United States Patent Application Publication US 2026/0191916 A1 - sequence listing, part 19

SEQ ID NO: 39 - DNA, 3384387 bp, Clostridium scindens (residues 1,692,195-3,384,387 of 3,384,387)
  source 1..3384387: mol_type = genomic DNA
ctcctatcttccgtttatacttgagcataatcacgcgcaccaaaaattccggttcccacacggaccatcgtcgcgccctcttctatggcaacctggtagtcattggtcatacccatggaaagaatactcatagtaatattatcaacgtttttctctgcaatgtcaacagataatttacgcaaacgtgcgaaaatcgggcggttttcctcaggattatctacaaaaggagcgattgtcatgagtccttttacctgaatatgggaaaatcctgcaattttatcaataaattcgaaaacttcttccggcataaggccgaatttgctctcttccttggccacgttgacctccagcagtacattcgctaccagatcgcgcttggcagcctctttctcaatcgcctctgccagcctcagggaatctacggaatggatcagatccaccttatcaatgatatattttactttattgcgttgcaaatgaccgatcatatgccagtggatatcctggggcaggagatcatgtttgtctgacagttcctgtactttattttcgccaaagatacgcacgcccaggtcatgagcctccttgagggtctccacaggcttcgtcttgctgacagcgatcagcgtgacctcgtcccggcttctgccgcagctgtggcacgcagcttgaatctttgactctactgcttccagattttcctttaacatttaaaatcactccttttttaaaatactacgtcattttcatgaacttcgcttccgtccagcgcaatatgatcatagttagcaagtccgtaatcattacctgcctccacgatatagtagtcttcgctttcacacaggatatgaatctgcttgaatacggcatatcctttgttaatattatatacgcctttcaggcttttggtcttcttaagcggataagtctcggatccgtcaggctcccttaaggaagtattcttgtcaaatacattcgggtccagatagaccattttgttctctttatccctataatagacctccacatttttaaactgggcatcctcttttccattatcgatcaggacgccggtctccttgctgttgcccccctgcgtaagatagttttccggtaccagatagaacttcttgtccgccacggaagacttgggaatcttaagtcccgactcatcttccaatatcagctccatatccagatatctttcttctgcatagcggatcatagaagtgtcgaatgtcaggaatccaaggttggaatctttcgtattatagatggaaaagccagcaaccgcagtctcattatccttggaaaaacggaccttcacgcttttcatatcggccatttcctgggcggcatcatcatccagcaagatgacaaccgtccagttattgtctttgatcaacttatagaccggacttcccgcctttacccggctattgttcttaaggccggtggcctgatagtccttcttggcgatcatatcctccgtcacatcgctgatcgtggtattctcatatccatctgtagaatacatgatgactccgtctgaatccgccgagtatatctgcagcccttccattccttccgtgaccatctcatctaactgggactgcctgctctggctggacttgctctccagtatattggagacgctgttcttaagcgtatacacgtctgaaaactgctgctctttaaaactttcgcaaaaagactgggtcttcatcagtatggaagactgttcttctgaagtcagttcctgggattcggaagtggcatccgcaaattccagtttcttgtctgacagcgtatagactctggtcttagcgcccaccttgctgccttccggcgcaaagtagttcacatagccgtctgcctctgcattcaccaccgtctcgtcccggatgatcagccccgtatacgccgtatccttaaggatggagccttccctgacttcataggcagatacatgcttgttggtcagatacatcaatacggtcatcaccagatagataaagattacgccgaagatgatgatgcctatatttatattccatttttttcgataaacttgtatgttcgtcagtttgtccctagccaaaaatatagccccctatttattgtcagtctagctgctttagcgctgctccgttaagatactggaatcgcctgccctgaaaacttccctctttcttcatccggcttaaaaattcgtcccgaagtttccaccagctcgtcccccaattgcagaacacggcatccttttctggaatgcggctaaagagcctctctatggcagtcgcgggatccagatattccaggaaggccatcagccgttccaggtattcctcttttgagcataaagttattgtaccattttcatagtcatcgcacaactgtgtgttttttgcaatatacagggaatgaatcttgacaaccggaatccgaagcgcggacaggacctttgaagtctctatcgtatccagcatatcatctccggggagattcaaaattacatgggcgcagatctcgaagccatattgtcttatggcaagcacggcatcgataaattctgccagcgtgtggccacggctgatagacgccagcgtatggcagttggtcgtttgaaggcccaattcgatcgtgatgccaatgtcatgctcccctcgaatacgttgaagcacatccaggtactctgctgtaatgcagtccggccttgtggagatggcaatctccgcaacatatggcaacgaggccgcctcacgcatataggcttcaaacttctcaatcggaaggaacgtattggtataattctggaaatatgcaataaacttatgggcatgatatttcttttcaatatgcttccttgtgacatttaactgctgcgtaacaggcgtcatgcaatccatggcctcgaatccggttcctgcttccgcgcaaaaggcgcagccgcttcccgcgattcggttggggcagctgacgggaagatttaccggaagcttgtataccttttcgccatatttattttttaaatattcagaataagggcaatatggcaatttttcgtccatctgataaaatattcctttctctgtgtataattcaatccgctttcggcatactaagattagcatgaaaaaaggaggaactcacatgaaatggtttgataataccgctttgacaatcgtgattataggtgcaatcaactggcttttagttgggatattccgattcgatctagtagccttcatctttggcaatctctcctggctatcccgcattatctatacaatcgttggcttatgcggtctctatctgattagtctatatggaagaatcggaagcaattcatagcgtcaacggtcattcatagcaagaggggtatcccatagcgagatgcccctcttatactctatttatcctatggagttccattatctacatcactcgcggccgctggttcttgctgccctatcccattgatgatcgctgtcatgtcctggtatagcagggattttgtatctgctcccatgacgatagatatgtacggcctgccggaggaatccttctccaagagaatcaggcagttcccggccggttccgtggtacctgttttccctccgataatcgtcgcgctctgcggaagttcggcttccccaagcgcatagaaattggtctgcttccaagtcacctgacgcattgttttgtcagcgcctgttatatttgccgtatattctgcagtattaataatatccacaaactcgtcgtgcttgatacattcattgaagatcaggtagaggtcataggccgtggtataatggttctcattatgtaggccgttgctgtttaaaaaatgagtttttgtggccatcaaggcctgggcttcctcgttcatcatctgtgcgaactgttctgaattcccgcctatgtagtcggcgatagcgacggcggcatcgttgcctgattccatcaatagcccatgcagcagatcgcccaaggtcatctgatccccggccttaatcccgcaggtcttctcatccgcggcaaagtttgcagcatctgcgtctgcctgtacggttaccatatccgtaaggttccccttcttaagggctaccagcgcggtcataatcttcgtggtgctggctggatagagcctgtcgtggagattgtatgcaaaatccaccttcccgtcctctacgtcaaacaagcctgctgcatgaagtccggcaggatcaggcgcgccctggaacgctacgttttcagacgccacacaaagatcggaggcaaagagttcgcccgtgtacaggtttttattgtaatgttccgcttcataggcccttaccacttcctgcgccttaaactgctgtcctatccgtgcgcatccggtcagcaggaatgcagccgatgaagcaatcagaatccattttccaaatctaccgatacatttcacgccagtcaagatcccctctgtcaattgctaatatgatcagttccgcggtagccagatttgtggccatgggtatattgtgcatgtcgcacagccgtattacatcgttcacatccggctcatgaggcttcggattgttcggatccctcaggaagatcaaggcatccatatcattctgggcaatctgcgcccccagttgctgcttgcctcctaaaggcccggccagatatttgtgaatgttcaggttcgtaacctcttctatcagccgtccggtagtgcccgtggcgtacagttcatgcttgcttaagattcctctgtatgcgatacagaagttctgcatcagcgtcttcttggaatcatgtgctatcaagccaatattcattgtttttcaactccttattgatattttttcggctgtaatccgacatttaaaacaaatccgatacctacgtacaggctgactagagatgtcaggccataacttacaaaaggtaaaggaactcccgtattcggaagcagttttgaagccacgccaatatttatgaaactttggaagcctatcaggcctcctaccccgcagcatatgatcctccctgctaagtcctgcgatcgtatgcccactagaatacattgtatcacaattaataataataacgcaacaactatacaacttcctacgaaaccaagttcttctccgatgatggcaaagatgaagtctgtctgaggctctgagatgaaattgccgttctttacggaagtggtcgtgttattattgaggccctttcctgtcagctggccggaaccgatggccataacggaattcttctgctggtatgcctcatcgctttcatacttttccggctcaaggaacgccaggatacgcttctgctgataatccttcagaagtttctgatccggctgtaccacgatgcttagaaaaatgatcgccacaggcaccaggatcaataggaccgtgccgatgaacttatagcttaatcctccaatatagatcattaggcagatgaccagggccgtgcatatggtggtggacaggtttggctccacgataatcagcgccagcggaattgcggaaagtatcgcatactttatcagagtgaccttatcgttgatatcctctgcatgcatcatgataaatttggcaaagaacaggatcagcaggatcttggcaagctcggacggctgaaaggtagtgaatcccaggtcaatccagcgtgtcgctccattaaccttatctccgatcaccagcacagcacccaggatcagcacgacgaatacataaatgatccagtaaaagttcagcacccacacatagtcgatcaaggatacgatgaccattgcgataatccctataatcatgccgacaatctgtcttgactggtatacttctttcgcgcttccaacggcaagcacgcctaatatggacaatgcgatgaccaggacgactagattgaatttataatcttttaaatgatatggttttgtaaatctgggtaatctcacgtttcttctcctgcaaatgttattactacttgtgtacggttaatctctacctgaaaatcctcttctgtaagttccatgtacttcgaaagcgattcgtacagttccctgcatatattatcataggcatccggcgtacagaaaacccggtctgaagtgaccagcgctttcagccgattctttgcgattgagacagaagactttcttaacatctttgactcctcctaatctttcttgaataaatgtgaaagtttggaaaagaatccggaattgttttccagttctataaatggaacctcaattcccataatacgtttgcagatattaagatatgcctttcctgcttttgaatcaagccctaccacgggttctccctggttggtgccgattaccacctgctcatcatcgggaagggcgccgatcaggggaacggacagaatctctgttacgtcgtccaccgacatcatatcgccgcgcttcaccatatccatgcggatccggttgatgatcaggtctatcttcttaagctggttgctctctagcagaccgatgatgcgatcggcatcacggatcgccgatacttccggggttgtgaccacgatggcgcggtcagcgcctgcaatggcattctggaatccctgctcgattcctgccggacagtccagaagtatgtagtcgaattcgtcctttaactgggacgtcagttttttcatctgtccgggagagattgctgtcttgtccttcgtctgcgcagaaggcagcagatagaggttctcatatcttttgtcacggatcaaggcctgttttagccggcatgttccttcaatgacatctaccaggttgtagacgatcagattctcaagtcccatgactacgtccaggtttcgaaggcccagatcggtgtcgatcacgactacttttttatcaaatttggataaccctgctcctatattcgcggttgttgtggtcttgcccacgccgccttttcctgatgtgattacgataacttcgcccatgaataacttcctcctataactggttttacttcattatctccaatacgaagctttgtgggcctcatatgaagtgctgctatgactgcatcgcagtcgccggcgacgccggcaactacggttccgtagatggttcccgtcacgacgacattgcctttggatatgactttggcgccttcttctacgtcgcctacgatgacgatgcttttttcagattccagaatctgtcttcttctcagggtacctttatagaactgtccgtctctttcatggatggtttcaaggctttcatccagcatccgcttgtggagccgttccgtataagtattcttctcaatgatgcatagtatccgtatcttagcagcatcctgtatgacttctgccatacgctgctcttcctcttctgtgaaagtacggccttcaaattcgacagccatgtcagcatgattgaaaaaatgtgctgacgactcgaacttttctctcacctccggcaatagctcttcatagggcatgtccggatcaaagtatatggtgatgccgtatttgttactcttaatgagtaccgggtctttcacatacgctcatcctttctgtcgctctctcttctttttattaatctccaactgtcgcgcctgcactgatatctgcggctgttccggtaagaatctcttcttccggcgttatctgataatagtattccattatgtcgttccctacttctgcggcataggtcgaactgtatccattcgcaatccttatggcaaatgccacctgcgggctgtcgctaggagcgaatcctacgaacagcgcatggtcaggatgcgtttcgctttgctgcgcagtacccgtcttgccaaacagtttgacatcactggcgttcagcttggtaaacagattgctgtgggcgactgacaccacgtttcgcattccgttatggactgcgttccaagtggatggcgccacgtcggtcatggtatttagaacggatggctcataatccttgacagtcttgccatctacggacgtaatcttatcaatcaggcttagcttgtaaacagtgcccttgttggctactgcggtaatataccgcgcaagctggctggtagtataattattcgtaccctgtccgattgcggaaggtacggaagacttatcggatatctgcggctcggattccgggatctcaagacccgaagtctctcccaggccgaattccatcgcgtatttcttcaaagtatcggtacccaggtcactggaatagtaggcattggtcgcgccgccttctgcattgtcagagccaatctgcgacaggccgttatctttcaggctcatccggtatcccacttcatagaagaaactgttgcatgaattctcaatggcgccttccacattcagactgccgtgagccatgggatagatccagcatttggggtttggcgacaccttcttgtagattccatggcatggaaggtaagtattgttatcaatcacgccttccgtcaggcctgccacggccaccataggcttgtaagtagaacctggagccgtcttttcctgcgtcgcgttattatagaatggccgggcctgatcggtcaccagtttgttgtaataattggaatccatggtattggcaagcctgttattgtcgtatccgggataggatacgcaggccagtacctcgccgcttgtcgtatccgtcatgaccagcgagccggtacaaggctccagcgccagctggccgggagtaatctccaaagtctctatcttgccccttaaaaagtcataggcgccaatgcttccggaattcaggccgttatactggtcctcgtcataagtaagaattccctgctcatacagcatcagacatatctggcgtccggtgatggctcctgatttgatcatgtagcggtacaccagcttgttgaaactgttgtcggaatcgatgtaatccataatatatgatacgattccctgataaagttcgttggaatcggaatatttccccttggaggatacatagtcttttaatagagacgtatcaatccagttcttggaaatcgcataattgagataggtatatatattgatggattcctcatccttccacgctttataggttgcgtcgttggtgtcaatggcatccggcatgatcacgcctgtggtgtcggtcagcacatcagagacgatgtaggtcaggtatgcctgtatctcctttggcatatccttatatgcgcctgcattgggatcctttaggatatccgatagctggctctttacttcttccttacgggcagtaaagatggaattcacctcatgctcggtaggctttgcatcctccgcgccaaaatgattcatatccagaatatcattgctaatgaatgcattgtaaacatccccgatcgggatgataacgtcgcttccgtcatctacctgattccggttaaaatcaagcgtattctggatctttgccagaagaatgccggccagttcctgttccagaatatggtatgccgccttctggaggttggcatcgatggacaggtatacgtcatttccagccttggggtcttttcccttaaccatttcgatcaccttgcccacactgttgacgtacagcttgacctcccctttctttccctggagggaactgtcaagcgtctgttccagccctgatttgccaatggtgtcgatcagggagtactcctcctgctcttccttactcaacgcatcatattcttcctgggaaatctgtccggtatagccaatgatattagaaaagcatttgctgtccgcatagcggcgcaaagattcttcttcaatattgattccctgaagcgtgtccagattctccatgacatctgctaccgtctcgtcacttacgtcttccgcgatggtggtcgcgatgtatttctggaatccgtttaacgacatggcataacggacgttgaccagtttcaggacttctgatttttccatcttcttctggttgattccgtagccgttgagctcatcggtacaaagataatccacaagacccgccgcagagatgctcttctgcttgtccgacaattcatctatggtcttcttgccaaacacatccgctatgaatctcagcctctgggtgtcattctccgcaatgtagatatactcgttattgttatccaggataatgccgaaatcattgattacggtgtctccattggactccaccattccgatcacagtggagatgaccttgttcagttctttatttttctgcttgatgctgtcataatctccgttgtcttcaatcgtaaccgcataggccagttcattgtaagccaggaggacgccgttgcggtcatagattttgccgcgggttccctggacctccttggtcttttggatctgaagcttataatcgtcaaaataatcctgtccttttacaatctgtagatagaacagccgctgtaacagaatggcggacatgatgcagaacacgataatgacgacgaatatacgggattttacaacttcatatattccggatttgatccggtcccataaactatacaaatttgcttgcactcctttgttcttctgcttccagtttcttgttgatgtgtaatatgatctgatacagaaccaatgttatcagaatggtatataccagttccggcagaatgatatgtgtcagacaattggtaaaagcgaaatttccctgaagcatgtacaggcagaaatacgtcaccagcccatagatcagttcgcttgcgccgataagcgcgatcggcagcttgatatcatcatcatagaacaggcgtctgaagaagccgttcaggtatccgatcaccgcaaacagcagcatataaaagcccagggcgctgccccagaatatgtccaccagaaggccggatacaaatcctacggccattccttccttcttcccccgcatgaagccaaaagaagaggtgacgataatcaataggttgggcttgatggacgcaaaggacagccggtggaatatggtgcattccagcaagaagcagatcactataataataaaggttatgatctttcttttcatggactactctcctttgctgtctttgtccttggcatccagcatctcctgctttgtcgtagtgatgaccaggacttcctgaagcttgctgaaatctacggcaggcgtgatatagccggagcgggtcaggttgttggaatccacttccacctcgctgatatagccgataaacaggccctgaagaaacctgtcactgacatgagaggtgactacctgctccccgacttccactttattgtcattgttcggcaatttttcaaaacggatcctgccgtcagccatcagtttcagatcccccctgactacgcaggtgtctgatgtggacagaatcatggcgctgatattgctggcatcatcaatggtagaacggacgcgggcataattagggcctacctccgtgacgatgcctgcaagtccgctgcccgcaaggacattgcagttgaccttgatgccgtctttgctgcctttatctatggtaaaatctgtaaaccagttgcttccgttattggcaattacatgggcgccaatcttcttgtaatccgaatagttctcatccagcttatacagttcccgcaggcggtccaattcgtactgctcctgacggagacgcgtattgtcaatggtcagttcatccaccttggactggagggccttattctcttttttcatttcctccagagtctcaaagttgtcggataggtcgctcatgaaccgtcctacataactgattcctttctgcatggggattacggtataattggcgataaaccttaaaggcccgccaccgtccgcaaaacgttcaacgccaagcaggatcacgcagaccactgccagaatcagcagccagtatttacttggaagggaagattggttcttggttttcatattatctcatccacctataattttcatctaacattgaatatgcaagttttctcaaatctttggacataatgatctttttaagtccggttaccgcgcagatgtccgggtccagagccgttctggttttaattccaaccatctcctcgatataggtctcaaggcctgccatattggcaactcctccggtcaggaagatgccgttctcatgaattgccctacggacctccgggggggtcctgtctaaaagggaatggatggcgcgcacgcattccagcaaaggatccttcatagcggcacgtaccaggctgatggatatcggcttctgcataggtacgccggtgatcagatccctgcccgcaacggttaatacggactctgaatcgctggtgaatattccgaaattctttctcaggacttctgcggtcagccgcccgatcaggaagtcatggctatggcgcaccagattgacgactgccaggtcaaaggagactcctccgatcttaagcaggcggttcatgaccatgccgcctccggccagtaccgacagttccgtagtctcgccgccgaagttggcaatgaacaggccgccagtattcttgacatccaggttaaggcccactgcatccgcgatggagcgttctacaatattcacttctcttgcgcgggccgtggagtggatcaccaggtcgaagaaggctttcttctccacctcggtcacatcggttgggacagcgattacatattcagatccacgggcaaactggcggtccttcttcagcaggttctgaagcaggaactgcatattattgaaccgcgagattacgccctctttcataggaaagaccacttctatattggacggtgccttctcgtacatctcgtaagcatcatcccccaccgcaaaaatctcattcttatctgcaatcgcaattacatctttctctttccagatcgtatctttctttttatcgtagaccttgatttcataagagccaagatctaatccgtatatatttcttgccatctgtgataatcctttctacagcaatccctcctcccggaagcttatataacaattattgccaatgatgatatgatctaacagttcgatcccgatcaatgcgccagcatcaaggattctctttgtcgtcagcatatcttcccggctgggagtcggatcaccactggggtgattatgcatgattactatggatacagcattcttttgtaatgcttctataaaaagctcccttggcgtgatgagggaggcatttactgttccctttgatatatctgtctcgccaatgagtcttgatttcgagttcaacatcagaagcttcatcacttcctgcttttcatgccttaagtcttccatataatatctggcaattgtagcgggatgcgagaaacttaatccatcctggtaactggccttggaaagcctcttggcaagttccgatatgcaggatatctggattgcctttactttcccaatgcctttgatcttcagaagtctttccatactgaactgatgtatgcccagtatgcctggctcgcctgcgtgatagaggatccttcttgccagggaaagcacatcctctccgcgagtgcctgtacgcagcaacacagccagcaactctacatcacttaaactggcagcccctttgcgctcacacttttcatatgggcgttccatctcgggtatctcttttatggtatttgactgattcatcttatctttagattcgtacgacactcataatagaacttataagaaacgataaataataatggaaagaatcacgccaataatacttgcaatggttatcttaatcgtcaggccgaacgtgactacaagaagtcccagattcaggatgattggctcatccagtccgaaggactgtccgtaggccagccagctaagagccggtactccttcggccagcatgccgataaagccaccaaggacgattcctgttaaaataagcagaaacaaagcccaggcgttcttactccctgttcccttcatatgtactcctcctcgttttgtctatctaaaaaactcaatacattttatcatatttaagaaaaagtgtatatacttatcccattaaaaatttcttaagcctttcggtagtttgtcgagagattggtattttttgacgatagattctgccgtttttagtccatccatggcggctgatgtaataccgcctgcatagcccgctccttccccgcatggatagagtccgaaaagcgtactctgcatcgattcgtcccgactgatgcgaaccggggaagaagtccggctctccactccggacaccagagcgtcagggcggggatatccctttatcttacggtcaaacgaccggatcccttcttccaaagccctggatagttccggcgggaatatctctctgacgttgctccaggcataggcccccttcatctgtggaaggatgtctcctggtcctttggatggcctgttcttgcaaaaatcttcaaacagctgtaccgggatccttcccttacctaagcggtaagccgcttcttcaagcctgcgctggaactccatgcctgccagaacgcccgtcccgccgtaatcctgtggcgttacggttacgatcacggcgctgttggcattgaagccgtcccggtcgtggtagctcataccgttgactgccaggcgcccgggctcggaagaagcattaaccacgtagcctccggggcacatgcagaaggtatatacgcccctcccgcaggcaagattctccgtcagcttataggaggcaggaggcagggtgccgtcgtttttcattccatactggaattcgtcaatcatagcctgaggatgctccatccgaacgcctacggcaaaagatttggattccatgggaatctcgttcttaagcagcatggagaaggtatccctggcgctgtgcccaatggcaagtacggcaatctccgtctcaagggcatattcttttccggctgcatgatcatagacctgcagggccgtaagacggcggccctccccagcggattctgacagaatgtccgtaacccgggtgaggaagcgcacctctccgccataggaaaggatggcctcccggatgttctttaccacacgggagagcacatccgtaccgatgtgaggcttatgctggtacagaatctcctttggcgcgccatatttcacgaagagttccagaactttctggctgcgtccgttagaatcatggaccagggtattgagcttcccgtcggagaaggttcctgcgcctccttctccgaactggacgttgcaattctgatccagttctccggtagcccagaaccgctctaccgcctgcatccgttcttctacgcaggccccccgctccagaagaatgggccggtatcctaagaccgccagctggtagccgcagaaaagccctgccggcccggttccaatgacgaccgggcggtgatgcagaacttcggttccattcgcctgaatctggtaagacaggggcttgtctttaaactgcacattctgattgcgcactcttttcttgatggaagatacattcttcacctttacatccacggcatatacatagtaaagttctggcttccttctcgcgtccagggactgtttttttatttcataagaaagaagcgaatcttcgctgatgcaaagagtctttaagatcttctccttgagatccgcctctgaatgcttgatatttaactttaactgattgatccgaatcatagatatcattctcctttttctgaactgccaaaaagaaataagacccttcgatgtcagggtctttccgccgccgcgcgccctgccaggtatccggtagcccaagcccactgcagattgtatcctccgcatatcccctccacatccaggagttcgccggtaagatataagccatctgcgtacctggattccagcgtatccggatatacctcgccagtacgtacgcctcctgcacagacctgcgcattgtcaaatccattggtgtcctcgatcgtaagcagagtctgcttgcaggcgcgtatcaaatcctcccactgcgcgggcttaagttctgatgccggaaagttctggcggatatgagacagttccagcagtcttgggattaattttttagggaagattcccgtcaggaattcctggcatgtggcataagggcacttgtccaaatgtgtgttaaatgccttgcgtacctgggatgcctccatctcaggaagaaaatctacccttaccttcatctctttcccctcatacaatcctttggcgatgtggcggctgatctggaataccgggatgcccgagatgccataggcggtaatctgcatttctcccgtgtcctccgccaggacctggcgccccagaagcgccgcgaccttggcatcggttcgaaccccggctgccttggcgaaaggatgtttctttacttttaactgtaccaatgcgggaaccacaggagacagcgtatggcccatagacctggcaagcgcgtacccgctcccgtcggaacccaggcttttggacgcctttcctccgcaggcaaggatcacccggtccgcagggaacctctgaccatcggcacgaatgacaaatcctttggcggaaagtttcagagcctctacgcgcaccccggtatatatcttcaccttctgcctgcgcagttccatttccagcagttccagaacggaggccgcctgatccgagcggggatagatatagccgccccggcttttggtgaaaagtcccagggaagcaaagaattccaaggtctccccatacccgaactgcttcaggacattcctggcaaattccggatcttcgccatggtagcaggaagcatccatcgcctcgttggtcaggttgcagcgtccatttccggtggcaagtattttctttccgatgttctctttctgttccagaataaagacctgggcatcgccgtcgcttctggccgcagcaatcgcagccacaatgccggaggcccctcctccgatgattccaatccgattcatatctgctccttattgctcctcttctatggcagtgttacgattccatcccttaccaggtattccagagacatcagaatgcccagtttggcatgaggccatgtaaggccgccctggaaatacacggcgtatgggggcttgatcgggccgtccgcgcttaactctatagaagagccctgaacgaatgcccccgccgccatgatcacgtcgctgtcatatcccggcattgcccatggctccggcgttacataagagtctaccggggcagccgcctggatgcccttgcagaaagcgatcacgccttccggcgttccaaattccactgcctggataatatcatgccggctttctgttccatttggaaccaccgcgtagccaagccgctcatagatatttgcggcaaatatcgccccttttaatgccccggccacaacggtcggcgcaaggaataagccctggtagaaggactgcatgactcccagggacgcgcccacttcttttccaaggccgggagacgtcagacggtagccgcaggcatcgatcagatccttgcgtccggcgatatagccgccgatcggagccaggccgccgcccggattcttgatcagggagccaaccaccatatccgccccaacatcgctgggctcgatggcctccacgaactcgccgtagcagttgtccaccatgcaaatgatatccgggttgatctcttttacaaaggcaatcagttccccaatctgcttcacggagaagctgggcctggtctgatatccctttgagcgctgaatggtcaccagcttggtcttaggacctatggcttttcggatgcgatcgtaatcaaaggtcccatcctccaaaaggtctacctggcggtaggatataccgtattccgccagggagccgcaagacggacggatgccgattacttcttccagcgtatcgtaaggctttccggccggggacagcagttcatcccccgggcgcaggtttgcgctaagcgcaatggataaggcatgggttccgcatgcgatctgcgggcgtacaagcgcgctttccgtatggaatacgctggcatagacttcctccaatgtatcccgtccctggtcatcgtatccgtatccgctggcgtagttaaagcacccctcgctcacccggtttttctgcatggcctgtataaccttcaactgattatactccgcgatctgatcgatctgttcaaaacgctctttcagttctttctcaatctgccctccaaatgcaagaacgttctgcctgattccaatctgtctgtatattgcttctatctctaacatgtcgtatatgcttcctttctagagcgcatccataatcttcatctttaccacggcgcatttggcatcaaactcaggattcagcgagcgaatctccagcaccacgtccgcggcctccctgaattgccgcatgtcgtacagaagcgcggcccggttcaattcaaacaaggccctttccccttctgtccggatcagcggcttcagatccagcagctgctggtaggtggatggcgcattatgactgcaagaatacaattccatcaatgtattcatcttttttaaaaatttggaacccccgaataatcttctaaacatagtactccctccatatgttttatcattgtgtgcagtatcttttcttcatcatagccgtatgcttctttctcaatccagattacctgtctctccctcttaaaccaggtgatctgtcttttggcaaaatgtctggtatcacgcttaatcatatagatggcttcgtcaagcgtgcattccccgtccaggcaggcgaggatctccttatatcccagcccctgcatggaaaccatatccctggcataccccatctcctttagccgggacacttcttctaccaggccttcctgtatcataagatccactcgtctgtcgatgcgctcatataacttctggcgctcgtcatttaggacaaaataaacgaaattatagggtgattccttctcccgctccttctcattatgctccgatatcttcttccccgtctgatggcagaattccagtgcccggatgactctcttggtgttattggggtgaatcgcatcagcggccttcggatcgacttccttaaggcgctcatgaaggcttaacggcccattcgcatccgcatagtccatcagttcctggcggaatgctcgatcgccgtcattctccgtaaagtcaatatcgtacaatactgcctggatatagaatccagtgccgcctacgatcaccggaatatgtcctctggaatagatctcttccatcgcggccttggccatctgctgaaagcgcacgacatggaattcttccgacggctccagcacatcgatcagatgatgaggcacgccttgcatctcttccggccgtatctttgccgaaccgatatccatatgcctgtatacctgcatggaatccgcggaaataatctcgcccccgatcgcctttgcaagcccgatggaggcttttgtctttcctacggcagtaggccctgtaagaactactaatggtttcttcatctctatacaatccttttgaatttcttttccagttcccgcttcgtcatggcgatgatcgtcgggcgtccatgcgggcagtggtatgggttctcaagcgtcagaagctcgccgatcaaggaatccacttccgtggctgacaacttcatattccccttcacggcagccttgcaggacatggaggcaactttctcatcgatcatatccggcgaaagatttcggctcacttcatccgacaggccatccagcatctgcagcagcaaatccttcttggcaatgccgaacagattgccgggcactgcccttacggcataagactcctgcccgaactcctcgatctcgaagccgatacgggtaaactgatccatatactggtttaaaagttccgcctcctgcatgctaagatccagcacgatgggcggactgataaactgggaggtaaattccctggtcttcatgctctttaaagtcttttcatacagcacccgctcgtgggccgcatgctggtcgataatatagaggctgtcgttaaattcgacaagccagtaagtctcgaagacttggccgatgatcttatactctgcctgaaccttccgctccaccagattctcttcgaataagttcagctgctgggccgcatattccggcgtctcgcaaacccggtccgagggggcttccctgcggtcttcggacggctgggcagacactttaacatcaggcgccttcttaggcgcctcctgattctgctgggcgtgatatgccgcaacccgttccttcatcttctgcatgaaatagtccagggtgcgttcttccggcgctggaacagatttttttgccgacggtgcgggctgtacgctagtagttctatcgggaaccactggattatctttcttctgcgccgcatgaggcgctccgccctcctgcttcatgggcgctgcggccttaggcgcatcgacttccacatgcgggatcaactcttccgcatgaagtccatggtcaacagccgcatatatagaattatagacttcctgctgattattaaacctcagttccatctttgtaggatggacattcacatccacatgctcgccatcaatctcgatgtgcagtaccacaaaaggatatttatgctgcatggtaaagtccttatacgcatcttcgatggctttggatataatgctgctctttacatatcttccgttgatgaaataattctcaaaattccggtttcccctcgatatcagcggctttccaagaaatcctctgattttaagtccgggggattcgtagtcggctgccagcagattggctgcaatctctctgccatatacatgatagatgacatccttaagattgccattgccggaagtatgcagcttggactgcccgttattgatgaactggaaggagatctccgggtgggacaatgccattcgggtcagcagatcccccacatggctcgcctctgtcataggagtctttaaaaacttcctccttgccggcgtattgtagaagagctggcggatcagaaatgtggtgccatccctggcccctgtctcatccagttcttcttcctttcctcccgcgatccggtaccgggtgcccagaacctgatcctttgtcttggtgatcatctccacctgggagacggcggcgatgctggaaagcgcctcgcctctgaatcccagggagccaatatgtaccagatcctccacagtacgtatcttgctggtggaatgccgcaagaacgcgttgggaacgtccgatgcatccatgccgcagccattatccgcgatccggatcatagagatgccgccttcttcaatctctgtgacgatggccgtggctcctgcgtctatggcattttccaccagttcctttacgaccgatgcggggcgttcgattacttccccggcggcgatcttatcaatcgtaaccgggtctaatacttgtatcttattcatgtcctaccacctgtttttcagtttgttctgtaactggtacaatgtattcagcgcgtcgatcggcgtcaggttgctgacatccaggctcttgatctcctcgatcacgtcatcgtccttcaccgtatcgaacagggacatctgagccagatccacctcatcataatgcctggccttaagcctgggcggctcctgcccatggactgcaatatccttgatcctggtggtgatatccgcatgtaccagttcttccacgatttccctggcacggctggtgacgctttcgggtacgccagccagcctggcaacctggattccataactcttatctgcgccgcctttgacgatcttgcgaaggaagatgatgtcatcgcccttttcctttaccgcaatgcagtagttatttacgttgtcgatcttgccttccaactctgtcagttcatgataatgggtggcaaacagcgtcttggctcccaacagcctgctgctgctgatatgctcgattacggcccaggcaatgctcagcccatcaaaggtgctggttccccggccgatctcatccaggatcagaaggctcttgctggtggcattgcgcaggatattggcaacctctgtcatctctaccatgaaggtactctgtccgcttgccaggtcatccgatgcgcccactctggtaaagatgcggtccaccagtccgatatccgcgctggcagccggcacgaatgagccgatctgggccatcagcacgatcagggccgtctgacgcatataggtggatttccccgccatattgggacccgtaatgatagagatccggttcttcttatcgttaagatatgtatcgttggatatgaacatatcgttgggaatcatcttctccacgaccggatgacgcccgtctttgatgtcgatcacgcctttttcattaattttcggccttacatagcggctctgttccgccacaagggccatggaggcgaaggcgtccaactgggcgatggctttcgccgtcgtctgtatccgcaggacttctttggcaatcttgtcccgcgcctcgcagtagagctggtattccagcgcatacaacttgtcttccgcccccaggatggtatcctccagttccttcagttccggaatgatgtaacgctccgcgtttgcaagcgtctgcttcctcgtataatagtccggcaccatatgtttaaaagaattggtaacttccagataatatccgaacaccttgttgtaacggatcttcagattcttgattccggtcttctccctttcatccgtctccagcttggcaagccagtcctttccatcggatttggccgagcgcagccggtccacctcctcgttatatccatctctgatgatccctccctctttcattgccagcggcgggtcttccttaatagcctcctctaccagatggcataagtcttccagcgtatccagcctttcatagagatctttcagcaggggagacttcatctcctccaatatgtacttgatatgcggaagcatagacagggaacttttaaaagcgatcaggtctcttggatttgcagactggtatgtgattttgcacaccagcctttccaagtcatagaccggtgttaagtattcccggatctcttccctggaaatggcattctgcttcaactcgtccaccgcgtccagccggcgttcaatggaatttttatcaatcagcggctgctcgatgaatttccttaagcaccgggcgcccattgccgtcttggtcttatccagcacccacaatagagaccctctcttatgcttctcccgcagggtctcgcataattccagattgcgcctggtggaactgtccaggagcatatatttgccggttgcgtaagcggagagcctggtaatatgggataagtcccgcttctgtgtctcgatcagatattgaagcaaggctccggcggcaataatgccgcaatcatagtcgctaaggcccagtccttccatggtgctgacatggaaatgctccttgagcgtacgctggcagatcgcatcatcaaagtaccatgcatccagggaatagatggtgattcccagtttttccttcatcaggtccagatccatgccgctcatataaaaagcctcgttgcagattaactctgagggcatgaatttgtagatctcatcaaataatttctcgctgtcatccagttccgtgacgaagtagtctcccgtcgtcacatccgccaccgaaaggccatacctgtctgcgatgtagaccacgcacatgatataattgttcttcgtctcgtccagagactgggtatctaagttggtaccaggcgtaacgatcctgacgacatccctttttaccaggcctttggcggttgcgggatcttccatctgctcgcagatggccaccttatatcctttggaaaccagccggttcaagtaaccgtccaccgcatggtaagggactccgcacatgggcgcccgttcctcaaggccacagttttttccggtcagcgtaatctccagttctttggatgcggtcagggcatcgtcgaagaacatctcgtaaaagtcgcccaatctatagaataggatgcagtccgggtactctttttttgtctgcatatactgctgcatcattggtgttaattctgccacgttatttctcctcttttgtctacatttttacatttcattatagcatttttcgatttaatatgaaagatacaatttatcaaagtacatggtaatgaggcttctcatccccatagagccaatacgtaagatagccgcttaacaggatcccaagaacgcacaggccggaaaatataaccatgaaaggcaggcatatctgcccgaagagctggaagggctgatcgctgtaatcccataccgccagcccaagccacttattgacgataattccggtaatgaattccattgaggttacaaagacgatgcacctgagcagctggcgccacagcgcgtcctgccaatgcaccatctttccctggatcgtaaaaaacaaaaagcagattccccccagaacaaacatggaccagtgggaaaatccgcggaagatcacttcaaacgaataatacaggcatccgccgaatgtccataaaaatagatactcacttaatttcttcatgtaaaaacgccctcactatatgttcttactacatagtttgagcgttttcggttcataatatgggtggtatatatttcttatgccgcaagcgcggatgtgccgccttttacacctgttctcccagataatagaagcccttgcattcagacaggcgcacgtcaaccaactggccgatcaactctgacgagcctttaaaatgcaccagcagattgttgcttagccgtccggtgaccatagaatcatcatgctcgctctttgcctctaccaaggccgtctgcacgcacccttcatggacggagcaaacttgcgcggcaatggcctgcacttccctaagcagccggtcaaaacggtcttttaccacatcttccggaatctggtcttccatggccgcggccggggtcccggtccgttttgaatagatgaaggtaaacgcgctgtcatagcgtacctttcggaccacgtccagcgtctcctggaaatcctcttccgtctctcccgggaatcctacgataatatccgtggtaagggagatatcaggcacggcctttctgatcttatcaacaagcgtcagatactgctccttggtatatctgcggttcatcttctccagaatcctggaacttcccgactggatgggcagatgcagatgcttgcagatcttctttgaattgcccatgacctcgatcagttcgtccgagaggtcttttggatgggaggtcataaagcggatccgctcgaggccttcgatcttctcaatctccgttagcagccgggcaaacgacatcggctcttccaggttctttccgtaagaattgacattctggcccaaaagcatgacctccaccacgccatccgctaccagccgctcgatctcccggatgatggcctttggatccctgcttctctcccgccctcttacataaggcacgatacagtaactgcagaaattgttgcacccaaacatgatgtttacgcctgacttgaagaaatatttccgctcattgggcagatcctctacgatcttgtccgtatctttccagatatcgataaccatctcctgggattccagcctctgcacaatcagttcggcgaacttgaaaatattatgcgtgccgaagataatgtcaacaaaacggtaacttttccttaacttctccaccacttccggctcttgcatcatgcagccgcaaagaccgatcatcatatgggggttctttttcttcaggggcttgagctggccaaggcgtccatagacccttgtattggcgttctctctaaccgtacaggtattatagatgacgaagtcggctacatcctccggcgcttcctcatagccaatcttctccaggattccccgcagtttttcagaatctctggcattcatctggcagccgaaggtggtcacgcagaaggtcagcggacggccgatctccagggacttcttctgaatgtaggttctggccttttctatgtaataatactggcgcttcggttcctcgcatggcgccgcgctagacaaactgatgtctggattcgtcgtattcataatcaattcctttcagtatatttgtaatctcttctctctctacttgcatatcctcgcatagtgcatccagcgaatgatagtaatctctgattttcgtatttactacgcttaatagtagcataggatctttgggaagtcctatctgcataagcatcatcctttctatttgccgtcctcgtatacgctggtctccgtcaccaggatctgcggcctgatatcgtattcatcatagggcacttcatccagcacctggcagtcaaatgcgactgccatggtgggaaggcaaggatgcgcggcaagatatctgtcataatagccgccgccatagccgatcctgcgcctgtcacggtcaaaggccacgcccggcataatgacaagcgcgtctgctccgtcagccaaagcgccttcctcaggttccagaatccccatcgtgccggggtgcagctggctgaaattctctatatggaaaaattccatcctgcgtcccaataccctgggcacccagacgtcttttcccagccgccaggcttcttctatgatcagcctggtgcctgcttctccctgatggtctacatagcagtagatatccgtggcctcccggaaacgcatatgggaagtcaccgcagccgttatcccttccgtggctttctgccatttcaagggaccgatttcttttcgggcttccagaacccgatgcctaatgtccttcttgctttccaaacttctcacccaaatctgtaatgcttccatccttctcctgaatggaaatattgtttaactggctgcgcagatttctcttaaatgagtcaatatactccctgcgcagaatctgctgttcctttgactcctcggccgtcaggccctctgctttggatttatgatataattcattgattcttgcaatcttctgttcttccatagttttgtccttccttcttgattcattcggaaattacgtacttatattacactatcttactttggaagtccacttctagcttgaataattttctaaaaagccataaagttcctctgtgctttccatgtattttccgttgcgaatctcctccctgatggttgccggaagttcatcatacaggatatccgtatattcgtaggcggtcttcttatcactcagatatacgaccacgtaaccgttgacttccatcagatagtagcagtcttcttttagcgcctgtccatccgcagagactgtcggctccgatttggacgtagcaggctcctcctgttcttttgtcacttgcgtctgcgcgcgttctttggccttctgataactcagctgatatgcgctggataccgccagcactgcaataatcgcagccgcaaaaaaaccaataccatacttatttttcataaggacaactccttttttagtacagtatcggtttgttttgccggatttatacagtttgcggacaatttttacacgatctttacctatattggccgcggatcagatgcagtttcctgcatagagatgccacggaggctccctttggcatatccagaagttcctcttccgtcacgccgccaagcagcaccagtacggcgccatatacgaccattgccgccagcactgccacaaccgttgcaatccttgcgcctgcaaacagttcaaacagcagatgtaccacaatggccacgactcccatcacggttgcagcaatcgccggaatcacgaacgtctttttacgctcctggacatagccgatgcgctcccgcagcgaatgggcattcaagatgcagctggcgccggaaaatacaatcttgcttaggactaccgcatatatgttccatttgaataccaccatcatgaggaacagggcaatcacgtggatcaccagggaaatggcggcattgcgcaccggggtcatcatatcgtccagtccctgcagcacggagtttgtaaccgtcgacaggcagaagaatacgacggacagcgctccaagctggagcatcagtgccggcttcgtattatcctgggtaaaatacaaaagatccagaagcggcttggccagaatcacgaagcctaccgcgcatggaatcgcgatcagcatgttgaatctggataccatattaatcttgttatgtatctgcttacggttcccggtctgcacggtcgctaccagacttggaatcagcgaggcagccagggcgcttgatatggacaagggtacattgatcatcgttgtatactggcctccgaacatcccaaggagttccgcatattccacctttttaaatccctgggcagccataatgttattaaacattgccgtatcaataaaatcactgatattgtagaccgtcgcgcttaagatgaccggcgcgatggtgataaacagaatcttgtatatcttcttgtagctttccctccggcgggtccggtcccgcttcatctggcgcttgaagattcgcttataggcatagaatatcagcgcaacgaacagaagcgccgccaaggctcccgcaacggttccgaccgtacctccggccgccgcgtatgccgggccataggacttcttccctctggtctcggcaatgctctttcctgcctgcagaaggaagtaagctccggctatggatgccactgcattcaccacctgctcaaccacctgggagatggcagtgggaaccatggagccatttccctggaaaaatcccctcagcacgcccaaaagagcgacaatcaggatacagggggccaggacacgaagcgcataggcactcatatccatatgcataatatgggaagcgataaaatccgcccccaggaagatcagaagggatacaaatccgcctgccagcagggcaaatgtcatagcccccttaaataccttataggcattccggtattcccccactgccaccctggcggaaaccaacttggacacagccaggggaaggctgtaggatgtcagcattaatgccacagaataaatagagaaggccacgctgtaatatccgattccttccgcgcctgctatattggtaagaggaatccggtacacggccccgataatctttgtaatcacccccgcaatcgcgaggatagagccctggaccaggaaattcttctctttctttctacgttgttcagccatacactactccatcttatcgtaatatatttaatctttccataatttctttctgcttacgttccataatctgacgctcctcgtcctgcatatggtcgtatccaattaagtgtaacacagaatgagcaattaaaaaagcatattctctcaaagcagagtgaccgaattcttcggcctgtgataataccttctctttggaaatcacgatatcgcccagcatcagttctcccgattccggatgaaagcagtcatcactttcttctaaaaacccaaactgtccgggcacaggatagtcagtcatcggaaaggacagcacatccgttggcctgtcaatgccgcggaagtcccggttcatcttgcggatctcttcgttctgcgtcagcagaaggctgacttcccactcatacggacatccggcataatcaagggttgtctctattacctgtcttgctatcttttcacactctatgggaagccttgcctccccttcttcttcaaagtatagtgtcatgatcttctccttttatccctgcctttgttcttgcctctgctctcataatcttcataagcctttacgatcttctgcaccagaggatggcggacaacatccttgctggtaagcgtacagatgccaatatcctcgatgttcttcaccaccgagatcgccacgtcaaggccggatacctggcccgaaggcagatccttctgggtggcatctcctgtaatgacgactttggagccgaatccgatcctggtaagaaacatcttcatctgggcaggggtcgtattctgggcttcatccagtataataaatgcgttgtccagcgtccgtcctctcatataagccaggggtgccacttcaatcaggcctttttcagagtttttcaagaaactgtccgcccccatgatctgataaagcgcatcataaagcgggcgcagatagggatcaatcttgctctgcaggtctccgggcaagaatcccagtttctctcccgcctctatggcaggcctggtaaggatgattctgcccacctcgttattcttaaatgccgtaatcgccatagccatggcaagataggtcttgcccgttccggcaggtccaaggccgaacacgatcattttcttgcggatcgcatccacatacttcttctgtcctatagtcttaggcttgatcggcttgccctgcagcgtatggcatatcacatccttgtcaatttccagaacgctgtccggactgtcctccatcacgagggcaagggtatagtccacgttctgctcttctacgttattccctctgcttgacagttccgccagctggcttaagaccttcctggcctgctccactctagaagcctctcccataatctttacgctctcccctctggcaatcagagtcacatggagcgtcctctctattttctttgcataagcatcaaactgtccgaacacattactctgctgctcggccggtatatccatgatcgcttcaattaatcccattcattattctcctgtttcttcttgttcttcttttagcggtatctccagcaattgagacggggcttgcatgcctatcggcatgatgaccgtaagcgtgccttttgcctcggctttttcgggtcctgtgtatattttaacactattctcgataatttctaccccctttttctccaagtctgcaagataacgcttgaaacgaaggcttaagatctgctggagttccttctttgtatgcttcttctcttcggaacggtaaggattggcagtccgaatgccataggatacaggcaggtaaaaattcttgccaatccgaagctgccgctccttggaatgcatctcccattcctcatactggttcttgattgtagccagtctgagaaatcggtctccgaccctaatatagtattcttccttctgtacgtccaaatattccttttccagatacacaacctcctggctgtcttcgtacgcaatggccgtctgtccccggatatctgcgtcagactcgtgatattggtatgcgatcgtctccccggcatcgttattgactggaacctgcccggatatcaggatatctcccttcttcacctggtcaccttctttgaccatggcaatcccttttctgggcacgatgtccgttatgacgcactcttggtccgcaacaatgtccgtagcgttctccctggcttcctgttctttttcctcctccgtcttattgaccaccggcaaggaatcctcgttttcttttacctggatgatcaggcgggtgccttttatggacgcggatacccatatgatgtcatcatattccttgcggatatcctttacaatacgggcgcaatccacatccgactttggcatcccatcctctacattttttgagcccagaaactccagaatggattcatcggtccgcgactgattgcctgtaatatcgatattccatataaaccgggacatcgctataatcataacaacgaaaagaaaggctccgccgaagaacagtttccgctttcgatatttgtgtaaaaaaaaaggaagaccgaaccgtctcacaattacaacttttgttcctgtcttcctgataatcggctttaactgccggaatccctttatcgtaatattcatttcgtaagctccgcccaccggcttcaagccccagagaaagatgcctttgtggctgcatgcattcaaaaatctttctgcggaatatcctatgacccggatgcggatatacccttttatatagcggatgatttttaacagcaatattgtctcctcctctaatgctggtattcaatggactcgatatgtccgttcactttcatctcatcattggtataatatgccacctggagcctctttccagtcaccctgatctgtccatttttcgtctggattcttaccagcgtatcggtatattcgatgatccccctgtaattttcaaggcttaattccatctgccctaagaccgtaagaactggcattccaagcgccacgtctttgggaagttcggataattccgccattttatttttgaaagaatagccatcaggttctggccttggtcctttttttttcgtcttcataaaagcgccattcatagaatttatagtaatctatgaggaaaggacggcgattatgcatggacggccctggattttgaaaggctgactcttaccttaacaggcaaggcgtacttgtcttaaaaacggccgacaaggcggtcatcacccacagcaggcctcttgcctgccttttatccctgcacaggctatgtatgttctcgaaacttttccgaagccgggatcttccttttgccagatcgacagctatcttaaacgcgccaaaggcctggcaggaggcgaaaagaatcaggccgccggtcctgaacgccggccgcttccttcctgcggcgatatgatacaggctggcaaacagcccgataaatgttgatatatgatgaatccagatacagattgtcaattctttttctcgcattttctatacttcccttcctaacaatatcaagtatattgtacctgattttcctgacagaatgtaggaaaatatatcgcaagtttctacaaacctcgcagttacacctggtgatatgcaaggtcttttaaggtattaagagaagagtatcccgcgccgaagtcgtccagcgagcagatatatctattgtccatccttaaggcagatggcttccatacgcactggctgatggtcggtatattcaaaatccgtatcaatgttttctactctattcactttgatattatcggaaacgataaatccatccagtacatatacctgggattcatcataattcccgctgtaaggcccgtcaagaagcctgcaggtaggtacattgtcggatacggcaaaggagaagccttctggaatgtcctcagcgcctacgacgccaggcacccacttatctttattatggatcggatatttttccatcccctcgaatgtctgattgaagtctccgccggcaatcacataatttcccttctggtattctgactccagtttctctgccagcatcttgctctgggcaatctttccctctccgctgtcataagcttccagatggaagttgatcagcaccagttctttgtccgttccttccaaaggcaccctggcctccagcatgcatcgcttcaagttgcaagtcttgaccggccatgagaaggattcgggaagcgagattcgggatgcttcttttacattcagatccgtcatcgtcaccaggccgctggttacttttccaatcggcggcagcggataaggcacaaagtcacatttgaaattgcatgcaaacatacccgcaagtccaagttcttcctcataataggcctgttcgtcaatatgataggacctcttggaatcccggtccacctcctgtagaaaataaatatccgcttcctgatccttcagaatggatgtgattccactcaagttttcctccacaagtttcttgctctccggctctaccttagaacccccatccataaagaagtcttcatccttgctgaggcccgcatatccgatgttatacgtaagaatcgtaaatgcatccccgttattcagcctggcgttccccttccccggcactatatcctcaatcggatccggcctgtattcccgtattgtcagataggcgacaactgccgccagcagaagaacgattgccagaagcacgcttcctataatcttccgtacttttctttcttttatcatattttccctttcctgcttcctttttgcttccatttattcctctgctatgagaggatgactcttgccccgtcgatttttgccagtccattcataggtattgtaagcggatccttgatatgtccggcccgcacatttagaacgactgggatctgcaagtctcccaaaacttcccttaccattgcctccgcgctccctggccgcccctcgatatcgcagtccgtcaggctacctatgatgactccggcagcctcttcaaacttgcccgcaagtatcagctggtatagcatcccatgcagccggtaaggcttctctcctacttcctccagaaaaagtatctttcccctggcatcgatctcataaggcgttcccatcagacggctgaccagagtcatattgcctcccgcaatacgcccttcgcagacgccttccttcaagactgcaaaggcttctccgttaaaattcttcaattcccgctctttcccaggcgaggccagcacatccaggaaattacacagtgccgtttccgtgggctgccggcttgtgctgaagaaggatgggccatgataggtcaccagtcctgtattttgaccgattgccagatgcatagccgtaatgtcactgaatccggtaaatacaggcctattcttgcttaacgcgtcataattgatcttatccagcaaaggtatggtgccatatcctccccatatgcagaaaatcccacgattattgggatcttcgatcactctgttaaacttctctgcacgctcctttggcgtccctctgcgaaatgccatatcttctgacacggtaacgtttaatccccgcgcctcaagatgagatgtggccgcatccaatgccttttcggtaaatgcgttggctggatcaatgatgcacacctggtctcctgccttaagaccttccgggtatatcggatttaatttttcttctttggattccatagtttgaagacctctccttatgactctcttaagcaacagtatagcacatttaacaaataatttctgcctattcttttctttcattatagtccatagtttttcatgtacagaaaaagcacagcggtaaaaccgccatgctttctattattcactcaattcgtaaggatttgccaaaatccggctttagtaagtaaataactgggtccaataatttctcccctctgcattctgatagaatcctactccgattttcttaaactttggattcaggatattggccctgtgtccttcgctgttcatccatccgttcataacttcttccggcgtacgctgtccccatgctatattctcgcctgatcctctgaatgtaatgccattctctgttaaaacggtgctgaaagaactgccatttggtcttgtgtgggaaaatgaagtttcgatttccttcgcccttacaagagccgcggattcaatccctttatcaattataagagcatccagcccggcttttgccctttcggcatttacaaggtctgccactttttccgcaaaactgcgctcttccgttcccggctgattgccgtcatctccaggctgatcaatatccggcgtaccggtattcccaccgtcagaatccggctgatcggtatccggagtattttctcccggcggcgtgataaccggacagtctccccagttaatattcatgccaggatacttatcatttaagccggatataatgtttttcagatcttccggactatttacctgtccgccgatcactgcatatccattcgtctttaattgatcgtaaacctggttcatatctgccgcctgagtcggaagcgctgcactgcctgcaatccccatggctgtaatcgttgctaatactgataatttcttcatgttacctccttgttgtcgataaatgttacaatttcattatcgatttattacatttttgttacaagcaagatagtaacacaagaacattaataataatacaagtaataattggtaattaaagattacttgtgatatggctctccggtaatgatccggtagctcctgtatacctgctccagcagtatcacccgcatcagctgatggggaaatgtcattttagagaaacttaactgatagtgggcacggcttagaacctcctggcttaagcctatggagcctccgatgataaacgcaatatggctggttccctgtatgcccagaagcttaatcttctctgccagtttctcggaggaaagcatctggccatcgattgccagagcaacgacataggcgtcttcttttatgtacttaaggatcctctccccttctttttgccggatcatatcttccaccgtggcgcttgcattctcaggagtcttctcatccgcaacttcaataatctctagtttgcaatacttgcccagccttttactgtattccgcaatcgcatctttcaggtatttctctttgatcttacctaccgttaccaaagtaatcctcatatatctgttcctctcttacttaagtacttcgaaactttgctggtaatattcacgattctcccctgccggggctgactttcattcatgcattgcctgtgaaaattacgaaagtacgttgctttctgaaccatgcggaatacctgtataggcggtatcagccccgcagccagaaaaatcagcaaggtagtttgaaattttcattcgcataatgcctcctatcctaacgccacatccaatatcatcatcaatacgaatcctacggcaaatccgatcgtcccgatattgctgtgctctccttccgcggattccggaatgagttcctccaccactacatagatcatggctcctgccgcaaaggccaaaagatatggcagaatgggcgtgatgtatgctgccagcaatatggtaatccctccggcaatcggctccacgatgcctgacagggatccatacaggaaggccttgcccctgccatggccctcgctccggattggaagggacacgatgaacccttccggcaagttctggatggcaatgccgattgacagggcgaaggcgcctgctacggtaacattggcgttattcgtaaggagaccggcaaatacggctcccccggagattccttccgggatattgtggatggtaacggcaagcaccagcatggtggactttttcaacgtacttctcggcccttcggattcatcgcttccgatatgaagatgcggaataatgcggtccagaagaagcaggaatacaattcccattataaagccaatggcagcaggcgcaaacgcgaactttcccatatgaccggacatatccatggcgggaatcaataaagaccacacagaagcagccaccatgactcctgccgcaaaaccaagcagcgccttctggattaccggcttcagttcatttttcataaacaggacgcatgccgcgcctgcggtagttcctataaaagggatgatcaagccccaaaatatcgtcatatttataacctcatttcctataacattccccctcatcataccatatccgtccttatgggtacagggggaaaattcgattttatggacctgaaaaacgaagaatagggcccctgcgctttgtaaagcgcctggcccctatccgatacaactgttcccggctttatttatcttttaaaagttcatggattccttttgcgccagcctttcctgcacccatggccaggattacggtggcagcgcctgtaacggcatcccctccggcatatacgcaggctttggatgtctggccgttttcttcctcagccacgatgcacttacgcttattggtctcaagtcccttggtcgtagaagcgatcagcggatttggagatgtcccaagagacatgatcaccgtatcgacctctatctcatactcggagcctggaatctctaccggacgccttctgccggatgcatccggctcgcccaattccatcttgacgactctcatgccttttacccatccattgtcgtccacaaggatttctttcggattcgtcagaagattgaagataaccccttcttgcatagcatgatgcacctcttccactctggcaggaagttctgcctcgcttcggcggtatacgatatgtacttccgcgccaagacgcagtgccgtcctggcagcatccatggcaacgtttccgccgcctactaccgcaaccttcttgcctgctacgatcggtgtatcataggaatcatcgaaggccttcatcaggttgctcctggtcaggtattcattagcagagaatacgccgttggctgtctcgcctggaattcccatgaacatcggaaggcctgcgccggaaccaataaatacggcttcaaagtcttcctcctccatcagttggtcgatggtagtggactttccgatcactacattcgtctcaaacttaacgcccaattcttttactttctcaatctcctttttaaccaccttttcctttggaagacggaattccggaattccgtataccagaacgccgccaagttcatgaagcgcttcaaatacggtcacttcatagcccagtttcgccaggtctccggcacaggtaaggccagatgggccggaaccgatgactgccactttatgtccgttggtcttctctgccttctgtggcttgatgtcatgctccagggcataatccgcaacgaacctttccagttttccgattgataccggatctcccttgattccgcggatgcacttgcattcgcactgtgactcctgcgggcatacgcgtccacagatagccggaagcgcggaggactcgccgattaccttatatgcaccttcaatgtccccgtcttttaccttggaaataaatcctgggatgttgatcgccacaggacatccctgaatgcatttcgcgttcttgcagttcaggcagcgggttgcctcttccatggcttcttccatattatatccatagcatacttcttcaaagtttgtcgctcttacttttgcgtcctgctctctgacaggcactctttttaacacatctgccattagttgtcacctccgcaatggccacatccaccatggtgagtgtcgccttcttgtgatttcagcattgcacgtccttcttccgtcttgtacatctgctgtctcttcatagcctcatcgaagttaacaaggtgtccgtcaaattccggaccatctacacaggcaaacttgatctcatcacctacatgaagcctgcaggcgccgcacatgcctgttccgtctaccataatcgggttcatgctgacgattgtcggaatctccagcttcttagtcagcagacagacgaacttcatcatgatcatcgggccgatcgcaacgcacacatcgtagtgattgccttcttccaccaatttctcgatcttcgtcgtgaccattcctgcatggccatatgtaccatcatccgtacatggataataattgcctgcaaccgccttcatctcatcttccaggatgagcatatcttttgtcttagagccaacaataacatccacatcgattccatgctctttcatccacttaacctgaggatatactggtgccgctccgacaccgccggctacaaacaggattttcttcttcttcaagtcttcgatatcttcgtctacgaattcagaaggacgtccaagcggtcccgtgaaatcgcggaaataatctccggcctgtaatccggctatcttcgtggtagatgcgcctacgggctggaatacaatcgttacagtgcctgcttctctgtcataatcacagattgtaagagggattctttcccctttttcgtccatcttaacgatgacaaactgccccggctggcaatgtcttgccacacgaggcgcttctacatccataagataaatcacagcagccagtttctcggcttttactatcttgtacatcttatttcctcctaatatttaatactcatttcatcataatgtatccgggcgaaaatatcaagtatctttcgacatctatacatccgcaaaaacagctggctcaaaagcacgcattgcctctgcgcccttcataaccgtctcaacagactgctctctttttaccgtctctattctccctgtgaaagttccagcacataattgcgagtagtcactccgctggtacgtcccttcgcattgaccagaatagccttgaatatggtctctccctccggcatgtctatcggcccgacatacttggtggaagcggtggtcggatcgcttttgtccatcgtatagtaggcctcatatccttccggaaccttaatctctatctgcgtggcagattcatactgccctgtagatggtgatacggccggtgcgtcttcgatcggcagttccaccgtataggtcttcttcaccggaaggctgggaattcctttcttgttgacagcaattgctgaaactacggtctcgccctcgccgatctgaattggctccgcgtatttcgtactctttaccgttggatccgtctcatccgtggtgtagtagatggtgcatccatttcccgcgcttaaggaaagttcctgtacatcttcgaatgtctcgctgtcatccaggctgaacttcggccctttcacgatatatcccgcaagcgtctccctgacattatcctgcgcatcttccagtagcagcgagatctctgccttctgatccgtgtccatatagaactggacgcaggcttcatatatatctgtattctttggctgcttgtcaatagcattcaggaagacggactccgctttatccagatcgtcctgcttcgtatatactttcgccagccctgcataagcttccgcttttttcccatttttagcaattgccttctggaaatattgcgctgacttgtcgtactccttactttctattgctttataccccttattcacgattcccgcataggatgtctgatatatggcaaaacaagccgctataactgcgactgccagcactgccagtataataagcgctctttgtcttctcttgcggcgcaatgctttcttgcgttccgcctgcctgcgccttctctcacgctcaggaagactgcctcctgaagtattcctgcgtccggaagtattacggcctgcagtattgcggccggcagcgctgcgccctgcagtattgcccggggctccgtttcgtcctgtccccgtcccgcgccctgcggacgtatatcttcctgcgccggtgcttcttcccatagcagtcgtatttcttactgattcatagatgtcatcttcagaataatcattctccccactgatggcacctttcacctgagcggtaagcatatcatctaacggattatagtcaggaacaatgcggacttccttcccgcattcttcacaatacaacattccatccggtatctcgtgtccgcaatacctgcacttcatcttatgataacctcctactgccagttttatcatacatcgttatcatttcttttataatccccttaaaacaatcctacaatattaccttcttctgatacatcaatcccatttgcagcaggtactttcggaagtcccggcattgtcatgacggcaccggtaagcgcaactacgaatcccgcacccgcgctgacgtatacttcacgaatatgaatatcgaaatccgtaggacgtcccagctttttcgcatcgtctgataatgagtattgattctttgccatgcagaccggcaaatttccaaatcccatggatgcgatcttggccagctgctttttcgctgccggctcatagatgactccccttgctccatagatttccttggatatagtctctatcttttcttccaatgataactcatcttcatataatgtatggaaatggctttctttattctctaaagtatctaatactttgttggcaagagcgattccgccttcgccgcccttttcccacacttcagaaagtgcgaattcgcagcctttctcctgacagaattggcggatgaattcattctccgcttttgtatctgtgacaaacgaattcaatgtcacaactacagggatatcgtatttctggatattctcaatatgcttttccagattcacaatgcctttcttaagcgcttccaggttctcttcggacagatccgcttttgcaactccaccattatacttcaaagcgcgcacagttgcaaccaaaactaccgcatccggctttaagcctgcctttctgcacttgatatcaaagaatttctccgcgcctaagtctgcgccgaatccggcttccgtaaccgtgatatcgcttaatttaagcgccatcttcgttgcccttacgctattgcatccatgggcaatattggcaaatggcccgccatgtaccaatgccggagtgtgctccagggtctgaatcaggttcggcttgatggcgtctttcagaagcgccgtcatagctcccgttgccttaagatcctccgctgtcactggatctccattaaagttataggctacgataattctgccaagccgtcttctaaggtcatggatatcatccgccaggcaaaggattgccataatctcggatgcaaccgtaatgacaaagtgatcttctcttaccattccgtccatcttgcttccaagtccgactacgatattacgcagattgcggtcattcatatcaagacagcgtttccatactacctggcggggatcgatctgcagttcattcccctgctggatatgattatcaagcaaggctgccagcaggttattggcagaagtaattgcatggaagtctccggtaaaatgcagattcaaatcttccataggaacaacctgggcatatccgccgccggcagcccctccctttatgccaaagcatggacctaatgatggctcccgaagcgcaatgattgccttcttgtccaactttgccagcgcctgtcccagtccaacggtagtggtagtcttcccttctcccgccggagtcgggttgattgccgttaccaggaccagtttgccatttggcttgtccttgactttctcccatacatcatcggaaagctttgccttatactttccataaaattctaattcttcctcttcaataccaactgttgcggccacatccttgatatgggccatctgtgcttcctgtgctatctggatatctgttttcatcggctaccaatcctttcttttgtttttttagacgttttcctccacatatcgttcaaactcttccggggacatcaatacctttcttggcttggttccctcctccgggcctacaacgcctgcctcgaacaactggtccataatccgagccgcgcggttaaagcctattttaaacgtacgttgcagcatcccgatggatgccttgtccttgtctataatgaggcggcccgcatctacaaaatgcacgtcgcggtcatcaccttccgctccaagtcccccggacattcctgccgcagaacttgtattgacgtggtttactatttcctcatcgtatgtaacatccccgttgtgattcttgaggtactctaccacgctttgcacttccttgtccgtaacaaaggagccctgtactctggccggcttctgatatccggacggatagaacagcatgtctccttttcccaacagtttctcggcaccgttcatgtcgataatggttctggagtctacgccggaggatacggaaaaagcgatccttgacggcatattcgccttgataagtcctgtaatgacattgaccgatggcctttgtgttgccaccaccagatgaattcccgccgctctcgccagctgtgccagacggcagatggcctcttccacttccccgggagccaccatcataaggtcggcaagctcatctacgataatcacgatctgcggcatccgctccagcgcctttccttccaccggcggcatagatgccactttttcattgtatcccttcatgtctcttacgttatattctgcaaaagcctgatagcggcgggtcatctccgccacgccccagttcagcgctcctgccgctttcttggggtctgtcaccaccggaatcataagatgcgggatgccgttatatacgcttaactccaccaccttcggatcgatcatgatcagtttgacttcctccggggttgccttatacagaatactcataattagcgtattgatgcagacagatttgcctgagccggtcgcacccgcgatcagaagatgaggcatcttggcgatgtccgccacgaccaccttgcctccgatatccttacctgcggcaaatgatatcttggacacgctgttcttaaacactttggattccagcagatcccggagcatcaccgccgagttctccttattcggcacctcgattcccacggctgctttcccggggatcggggcttcgatccggatatccgcggccgcaagattcaacttgatgtcatctgcaagccccacgattttgctcaccttcacgcccatctcaggctgaagttcgtaacgggtgaccgacggcccgcagctgacattggtaacggtcacgctaacgccaaaattctgcagcgtctgctgcagcttcatcgccgtctcccgcaggcgggcatccgattctccgctttgcttgctgccccgctttagcagggatataggcgggtactgataggctttctttggcttcgtagcacttgcggctacactggcagccacatccgccacctggcttgccacatctgcagaggccatcttgccccttttcttcgggaccggcgtctcatcaaaaggcgccgcttccatcaccggatctgcctccggctccgaaactgcggatggcatgtcgccccggttgattacgaatcctggctccttcgcagcgtacgtgtccggttcctgcatcatgtcctcttccatcgggtcaatggtcaattcctttacattcggcgacttcttcgctatcgcggtgtcaaaagagacgccctccacatgcttctcgcttcgctttccagacctggattgcttcggctgcgcttccttaagcttcctccgctcttgcgcctgctcgcgcctgcgctcggcatccttcctggctttgtcgtatgccttgcctccctgagcctttaccccctttagggccgacttcccggtaatgaccacaaggcagatgatcatcaggataacgtctaccacatatgtaccggcaatgccgatggcaggtgccagggcatccacaaggatatttcccagcatcccgcctttctcatccaccagctgcagaaaagtgcagaccagagccatcaagatcaggcatgtcgccactttcatatatgcatgaaggttgcctttgttcgaaatgacaaaagcaaccgctccaaacaggataaatggcattacaaatgctatccatccaaatatcctgaataagaaatctgaaatcgcttcccctacaaaaccgccgattccaaaattactgatcagcattagaatgctgactgcaagcgtgacccagattatgatctcgtccctgacaaaactctgctgcgtgttcttctttgtctgctttgtactcttgcgtttcttggacttagcagccattatacttcccccttattactggcaatactgtttatagtatatcatttttaaaaagggctgtcattacatattttcatactttttctgtctgctttggtcgatcatttcgtgcaatttattcaatgcctcgctcatgccgcccacttcatctatcagcccttctttgacagcttcctctccctccagaagcgtccctacgtctttcaccagttccgtaggattgagcatcagttcttcgattctctcctgggtcatgtgggagtgctgggaaaggaaccttgtgatccgatcctgggtcctgatcatattgcgaaggctctgctccactccaatgaacatgccgttggagcggaccggatggatgatcatagtaccgcttgggacaataaaggaatactttgcggagacggccaatgggcctccgatagagtgactgcctccaagtaccagggacactgtgggcttgctcaaagatgcgatcatctccgcaattgacagtcctgcctccacatcccctcccatggtgttcagaagaatcaggactccttcaatctcttcactgtcttctacttccgccagcataggaagaaggtgctcgtacttcgtggccttcgtgtttccggctaccgcctcatgaccctcgatctcccctatgatcgtcagcagcttgattctgtgcctgtccttattttcattcagattaatgctgcccacttccttaatctgttccgtttttttctcttcgcgttctgactctgccattaaaaaatacctccatacatttttcatttagtatgaaggtatttgcaatttttatacctgctccagtgcctgcgaaaggtcagcgatgatatcctcaatattctcgattcccacgctgaatcgaatcagatcaggctgaacgcctgcttcttttaactcctggtcgttcatctggcgatgcgtatggcttgccggatgaagcacgcagcttctggcatctgcaacatgtgttacgatggcgatcatcttcaggctgtccatcatccgtacagccgcgtcacgtccgcccttcaggccgaatgtaatcaccccgcaggttccgttcggcatatattttttcgccaggtcatagtacttgtctcccggaagggatgggcttgatacccaggccaccttttcatgcccctctagatacttggccgcattcaaggcattctcgcaatgcctctgcactctcagatgcagcgtctcaaggccgatattcagaagaaacgcattctgcggcgcctggatggagcccaagtcccgcatcagctgggaggttgcctttgtaatgtatgcgcctttgccaaacttcttcgtatacacaattccatgatatgtctcgtccggcgtggtaagtcccgggaatttatccgcatatgcgtcccagtcaaagttgccgctgtctacgatcgctccgccgacgcaggatgcatggccatccatgtacttggtggtagagtgggttacgatatccgctccccattcgaacggccggcagttgatcggcgttgcaaatgtattgtctacgataaacggaaccccatgggaatgggctgcttttgcaaacttttcaaagtccagcacgaccaatgccggatttgcaatggtctctccgaataccgccttggtattctctcgaaacgcgttgtccagttcttcttccgtgcagtctggatccacaaaggtagcgtcaatgcccatcttcttaatcgtatgggcatagagattatatgtaccgccataaagggcagaagcgcacacgatatgatcgccagcctccacgatattcatgatggcatagaagcttgccgcctgtccggatgaagtcagcatggcagcgactccgccttccagatcgcagatctttgccgctaccgcgtcattggtaggattctggagccgcgtatagaaatacccactctcctccaagtcaaacaatcttcccatctggtcgctggaatcgtatttgaatgtcgtactctggtaaataggcagcaccctcggctcgccgtttcccggctggtagccggactggatgcattttgtctcaatcttataatcgctcatttatttcctcctgtgaatttcaagatagatatttggtctgcagatggcgcaccatgtccatatacagttttttacattcttcattctttccggattcggcaaaatggatgcatggagtcagataatccctgtaaatcccttcatagatcctggaagaatcattctgcatgccgatcgcaagtacgatacgcggagcgatctcataatattcttctacgatacgctttccttcttcggtctgcatcaggtaactgtcacggtagtgcctgagaatcatcagttcatagcagtcatccggcttgttctggctttcgcacaccgcagtcgtgatatagcagaagcctttccggaaccctccggcgatatcctcaaaagaagatcttcctagtttcatggatgtaatctgcttcttattccacagttccaccatccggtcagcgattctttcgcactccgggtcccgggaataggtaagcagcggaattatatacacggccatagccatattataatccacggaaaacatctctttcttccttttcgggacttcctgcatcttcagataggcatattctggtatcactgacgccagttcctctatcagcccttccttgtcctcctctttggcctcctcgcacatcctggcaatagaggcgaatagttccttatgcccttcataaaggctttcaaaaagggagtggtaggatttcttcttaaagtatttgatattgcccagcatctcatcaaataaagattccagcgccttcttcgtatcttccatctgtcttcctccgttgcccgtcaaagcggattattcatcccagttgtggtatacatcctggacgtcgtcgtcatcatccagcatgtccagagtcttctggatgcttgcgatatccttctcatccgtaagttccacataagtctggggaatcatagttacttctgccgccgccataggaatgccagcctcctccattgcaagacgcactgcgctgaagtcttcaggatcagttagaatctcgtaactgtcttcttcctccacgaagtcctctgctccggcatccagagccagcatcataagctcgtcggaatcgccttcgtactcttctttatctactacgatctgtcccttcttgtcgaacatgaaggatacgcagccgggcgttccaacatttccgttgccttttgtgaacgcattctttacattggaggccgtacggttcttattgtctgtcaaagcctccacgatgatcgccgtaccgtttggcccatagccttcatatgtaatatgctcgtaatttgccgcattggcatcgctgtcggctttcttaatatttctttcaatcgtatcattcggcatgttattggctttcgccttcgcgattacgtcacgcagcctgctgttattagccggatcggcgcttccgccttccttgaccgctaccgcaagttcctttccaagcttcgtaaatatcttcccttttgccgcgtcgttcttctctttcttatgcttgatattggcaaattttgaatgtcctgacatagttcatacctcactttatatcttatcatttcgttgtatattcgcacttttcctattttatcactcttcgctgcgtttttcaatcttaactctctggattgtgttattatcaacaaaaaggactgtaaagcgatatccttcgtattcgaccacgcattgctcatcttccccgggaattcggtccagctggtctatcaggaatccgttcagagtctcatactcttccttttcaaattttacgaaaatcacgtcttccaagtcttccagatccatcatgccgtttgcggtatagctgccgtcggcattttttgtaatcagcacttcctcctcgtcatgctcatccaggatatttccaacgatttcttccaggatatcttccatggccacgagtcctgaagtctgtccatactcatccaggacgatgacgatatggtttttctccgcctgcatctctttaaacagggtgtcaatgctcttcgtctccggaataaatgtaaccggccttatgtaatccttcagatccttcacaggtaccggccttaatcgttcatccagatagcaggtcatcgcctccctgagatgtatgattcctacaatctcgtcaatgtcttctccgtatattgggaatctggagtaactctcctccagcatgaacttcagcgccacttccagtggctcattgccatccaccgcaacaatgttcttgcggtgggtcataatatctttcgcgtccttatccatatatcggaatatattgcgaatcagaccggctgcctccttaaccgtgtcttcgtccatctcttcttccacctggaatattcgcttcatccggtgaaataaaccgccctcttccataacttgctaattcaaactccttttctatgtatgaagctcaaaactgatctttaaagcctcatctactttgttcattatttctttatccaaatgacatactaaatccttcagccgctgcttgtcaatggttcttacctgttcaagcagaatgactgaattcttgacaatctgatatttctttgcatcaatctccacatgcgtcggcagttttgccttattcatccttgaagtaatggcggcacagatgaccgtcgggctgtgtctgttgcccacatcattctgtatgatcagaaccggccttatgccgccttgctcagacccgacaaccgggcttagatctgcataaaatatatctccgcgtcttacttgcactctattcacactccgatttttctaagataaaattagtatttccatctttttcggatgtattccatagagtttgcaaatcaggcaattaagcaaaccaatccatctgttccacaacctcgccgtgacggatgaactctcttgggattctctttccaaggtcgcagacgaactcatagttaaaccgtccggacagatcgcttaaggtttccaccggaagcttctcgttcccgtcgcagcctactaacgtaaccttgtcagcgtactttacgtcgtcaatctccgtcgcatctaccatgaactgatccatgcatacccggccaaggatgggagccttctttccatggatcaggacatagcctttgttggagaggcttctcgggtatccatccccatagcctaccggtatggtcgcgatcttggtaggacgcttggtaataaaggttccgccgtaacttacaggggtcccctccttcacccacttgacatgggccacatggctgatcagttccatcgcaggcttcagcggcacattttctttctttacttcgctggaaggataaagcccgtatgtagagataccggctcttaccagatccagattcgcctctttgacgtctatgatccccgcgctgttggaacagtgatagaacttgaacgtcaccctcctttcatccagggctttcttcatccacagatagccgtccatctgggaatgggtaaacgtcttatccgtctcatctgccttggcaaaatgcgtatacatgccttccataatcaggttgggcatcctgctgatggactcgatcttatcgacgctcttatcctcaatcaggaatcccagccgggacatgcctgtgtccagcttgatatggatatatgcctgttttcccatgcttcctgccagttcagagacctcttttgccatctcttcggtatagacggtcatccggatctcattttcgatcatagcctttctctgatccgggaaaatgcatccaagaactaagatcggcttcttgattccgccttttcgcaaaacgactgcctcatctggcgtagcaaccgcatagccccacaaatattccttgccctccagcatccttgcgatctgcagtgcgccatggccatatccatccgtcttgatgacggaaatcatctgcactccttctttgatgttcttcttcatcatctccatattatattctattgcatccaagtccacccttgcacagattctagtataattgttcataatttttttcctcctgttccttaaatgcttcacttaaatattctattaaatctcccgccatcacgctgtagctgcccttttcccgacgggccagatcccctgcccggccgtgcaggtaggtccccaggatccctgcctcctggcagtccatcccctgggccataagcccggccacgatgccagccagcacatctcctgcgcctgccttcgccatggaagcgttgccggagcggttgatataggcgcgttccccgggggatgccaccacggtgctggagtcctttaaaacgcaggttatatggtgcttttctgtaaactcctttaggatctccatcctgcggcttttcagttctaaaacgctgatgcccgtaagccgggacatctccttcatatgaggcgtgataatcaaatgatcatggggaatccggtccatatatttcctgtgctccgcgatcagattcaggccgtccgcgtcgatcaggcatgggacgcttagattttccagcgccgtcttcagtattttcttagacttttcactggttcccatccctgagccgatacataccgtatctgcccatttcagcaggcggataagttctccctcgtcaaaaaagtcgtaggtcttaacaatcgcctccggaagaagctcctgcaggatgattcggttatcttcgggcgtatagatctgtaccagccctgcccctgccttataagccgcctttgcattcaggtaggcagcccctgacatgcccttgctcccggctatgatcagcagtctgccatacattcctttgttagaatcttccattcttctaggcagcagtttccggaattcctccggttcataagtataagccacgcctatatcggctacggtcttatccgtatctattccgatatctgccacgatgaccttgccggcgtatccttttcccggatacaggccaagtcccaccttttccatctggaatgtcacagtaatatccgcctgaaatgccactcccaatatgcatccttcatccgcagagacgccggatgggatatccacagcgaatttaatggcattcgcctcgttcatctggcggataaccttgagatagcgtccaatgatttccctgccaagcccgactccgaaaatagcatctattatgatactatattcgccaggcttatactcgttgcagatatcggcgcctgtttcttttaatagccgcatctggctcctggtctcttccgtgcggtgggattcatttcccacaaagcagacggttacggggtatcccttctggttcagaagacgcgcgatggcgaatccgtcgccgccattatttcccgagccgcatacgatgcagggcctgcttagatccaacctttgcgcttccattacttccacgcattttaaggctgctcgttccatcagttccattgatggaactcccagttcctgcatggtatactgatctgccatcttcatctgccggctgctggccagatatctcattccatcacctccatcaataattgaacatataaaagaacgtgtaaagaccagcctgtctgcacatgcctgtcattacacgttttcgtcttgctatttcttatgttcttcgttatatctgctgatattgtaggataactgcataagactttctgataagtggacgttttccacaatgacatactccggcagattcaggtctgtgtgcgcaaagttccagattgcacgcacgccattctccaccagcatgttcgccacttcaatcgctttatcctttggaatcgtcagcacggcaatctctacgtcattgtcctgtacgaaagtcttcagcccgtccatcatacggatcggcacgcctctgatggatacgccttccagtctcggattcacatcgaagattcctttcaatatgaatccacgcttttcaaatgccgcgtagttggccaatgcctgtcccagattacctgctccgataatgataatattatggtcttcttccaatcccagaatcttgcctatctctgtatataaatactttacgttgtagccatagccctgttgtccgaatccaccaaagttgttaagatcttgacgaatctgagatgcagtaactttcatccgcttgcttaaatcattcgaggagatacgctccacaccattttcgagtaattcgcctaaatatctgtagtatcttggcagcctgcgaatcaccgcctgagaaatccctctatcttccactcatattcaccttcccattttgttctaagaatcattatatagaattgtggttgcaaagtcaaacttttagttgtattttgtcctattttcgatataatggaaacggatgcgtatgaaggaggatattatgatattagcatgtcacgggatcaataaatccttcggcgaagaggtaatcgtggccgatggatcttttcatatagaggataatgagaaggctgccctggtcggtccaaacggcgccgggaagtccactctcttaaaaataatcgtaggggaactgccgtctgacggcggggatgtcatccttaccaaaggcaaaagcctgggctatctggcccagcatcaggagatgatgagcggcaacagcatatacgaagaagtccggcttgcaaaggcagatatcattgcaatggaaaagcagatccgcactatagaactggaactgaagcatctaagcggcgacgccctggattcccgccttgagacgtataaccgtcttatggcggctttcgagcgcgcgaacggttatgcctatgaaagcgagatcaccggagttctcaaaggactcggctttatggaaagcgactttaagaagccagtggataccttgtccggagggcagaaaacccgggtttctttaggcaagctcctgctgacccgtcccgatatcctgttattggacgagccaaccaaccacctggatctgaattccatcgcatggcttgagacctatctgctgaactacccgggcgccgtactgatcgtgtcccacgaccggtatttcctgaaccgggtcgtaaccaaggttctggagattgagcagggaaaactgatgacctatctgggcaattacagcgaatatgcccagaaaaaagagcagatccgggatgcgcagctaaaggaatacctgaaccagcagcaggcaatcaagcaccaggaagccgtcattgagaaactccgctctttcaaccgggagaaatccatccggcgggcagaaagccgggaaaaaatgctggaaaaaatgaagccggtagaaaagccggtggaggcaagcacggaaatccacctgacgctggagccatcctgtaccagcggcaatgacgtactaaacgtcgagcacttaagcaagtcctttccttcccagcccttgttctcggatgtaagtttcgagatcaagcgcggagagcacgttgccattatcggagataacggtaccggcaagacaaccttgcttaagatactgaatcaggtccttgcggccgacagcggcacatttaccctgggcaccaatgtaaatgtgggatattatgaccaggagcaccatgtactccatatggaaaagagcatattcgatgaaatatccgacgactaccctacgttgaccaacacggagatacgcaatgtcctggctgcatttctattcaccggagacgacgtattcaaacgtatcggcgatctgagcggcggggaaaggggcagggtctcccttgcgaagctgatgctctcggaggccaacttcctgatcctggatgagcctaccaaccatctggacatcgtttccaaggaaattctggaacgggcattgaatgattataccggaacggtgctgtacgtgtcccatgaccggtattttatcaatcagactgccaccagaatcttggatcttgtcaaccggacctttgtcaattacatcggcaattatgattattatctggaaaaaaaggacgaattgacagccgcctacgctggcgatcctgacgcggatgccgctgcggccaaagaaactgtatccgaagccaaattaagctggcaggagcaaaaagaagcccaggcaaaggaacgcaagcgccagaatgaattgaaaaagacagaggagcgcatcacgctgctggaagagcgggacggcgagatcgactccctgatgatgcaagaagagatcttcaccaattccgtcaaatgccaggaactggcctcagaaaaggccaggatcgctggggaattggaggaactctaccagaaatgggaagaacttgcggaataaagcagaatacggtttgctcaaacaatagaatcacaatttcttagaaagcggctgactgcccggttgaactcttccgggttcttagccgctataaaatgatctccttttattcttacaagcctggcatttggcaggctttcacaaatcagcacagagtggctgtccttaatcatatcattttcccctacgatcaccagggttctggctttcacttcttttaactgccgtggacttagatcaggctgggtcgtcataagccccagcatctcggccttctgcctggatctatgatgaaacctgccaaaaaaggatgtgatcttataccccaggacgatcggaatctgcacgcttggctttacgcccgcagggcagagattggctccattaagaatcaggctctccacttttcccggatacctgagcgcaaaagcgagcgcgatattgccgccgtcgctgaatcccaagagatgcgccttttccatcccctgttcttccataaatccgttcaaatcttctgcaaactgcctgattgtaaaaggcttctctcctcgcggcgattttccgtggcctctggtatcaattgcaatgactctgtaatcttttgaaaaatattccatctgatgcttgaaataagtcccgtcttctccattgccatgaagcattatcaacggctccccatcccctgccttttcataataaagtctgatatccatcattcttccacctgctggccagtcttgttcttccatggcctttccttggcaagccatcccttttcttcccaatacttctggtcagccggattgtttccatcccgaaccaccttgcgcatgatatagaataaaatctttgtcttaagccccggctttacagcggctggctctctgtgtatttttagggcaagcttccggatattttccgtcacctgatcctttgccgcctgttccatatgttcaaagccggaggttcccaccttgactccaagggtgtaaattctggctacgccccaatacagcaggctgtctttgatatctttaagcgcagaccttatgccgcctccggcagccgtaacgatgcagatagcctgcttgccaaacatggatgcttccgggcggtgaatcatgcaccggtatccataatgatccagcagagccttcatcgcgccggatacgtgcatcacatataccggagaagtaaatataagcagatccgcctcgtcgatcattctggtaaaccgcttcatgtacataagatagtccaggcatctcgtctcgctctcccggatgcaggcagcgcatccccggcagaattccggcatgtctttgggaaggaacagttctgtgagctggtccccttcctgcatgatctcttcaatcgccaatttcccgacctgataagtagatcctttcctcatcgtgccattaatcatcagtatattcatcttgtcttctccccttttcttttgcatttacatctggtgcctgacaactgcatactcgtccccataactgtaatagggacagtcatgatatgtattgttcacaaatttataaagttcgtcttcatccagattcatctggcatgtgtagcattcatagtcttcatcatattcataatgagcgcaggactcgcaattacttttcatatccaagtctccttccaggaaaaaagtatagcacaattttatcttccgctcaaccaccttggcaggaagttatggaaagcaaacttgacatttatgtattgcatgctatactggaattatggaaagtaaacttgatattaggtaaggagggatattcttgaaaaacaggctggaagaaatccgcagagaacacgggcttaaacaggaagaactggccgatatcctggaagtctccaggcagaccatcggctccctggaaaacggacgatacaatccttccatcattctggcttttaagatcgcccgctatttccacaggaatattgaagatatttttatctacgaggaggaatcaaaatgaaagaaataaaatcctactgctggctataggcataatcctgtacttcgtctttggcatactggatagcatgccaacctttcccgcaacgtccgtcctcgaaaaaacaaatcaagccacttaaagtctctccccgatagccttaataaactcctcgctatttagcaccgtaggattctcaatcgtagtgatcaaggccagatccttcgtcatctttccggattcgatggtatcaatggtcgccttctccagcctgtcggcaaattccatcagttcagaattaccgtctaattcgcctcttttcctgagcgctcccgtccatgcaaagatggtagccacagagttggtggacgtctcctcgcccttcaaatgcttatagtaatggcgctgcacggttccatgggcagcctcgtactcataatagccgtccggcgataccagtacggaagtcatcatggcaagagagccgaacgcagaagaaaccatgtcgctcatcacatccccgtcatagttcttgcatgcccagatatatccgccttccgacttcataacgcgggcaaccgcatcgtcgatcagggtatagaaataaacgatgcctgccgctttgaacttctcatcatattccgcatcatagatttcctggaaaatgtccttgaacgtatggtcatacttcttggagattgtgtcttttgtcgcaaaccacagatcctgcttcgtatccagggcatagttaaagcagcttcttgcaaaacttgcaatggactggctcacgttatgcattccctgcacgattccctcgcccgtaaaattatgtaccagttccttcgtctgagtgccatcctcggccgtatagaccagttctacctttccggcccccgggatcttcatctcagagcctttgtatacatcgccgtatgcgtgtctggcaatggtgatcggcttcttccagtttttcacgcacggctcgattccctttaccacgattggcgcgcggaatacggttccatccaggatcgcgcggatggtgccgttggggcttttccacatttctttcaaatcatactctgtcatgcgtgccgcattgggagtaatggtcgcgcattttaccgcgaccttgtattttttcgtcgcattggcggcatccaccgtaacctggtcgttggtctcattcctgtgctccagtcccaagtcataatattccgtattcagttcgataaaaggctccagaagattctcttttatcatcttccagaggatcctggtcatctcgtcgccgtccatctcgacaattggtgttgtcatcttaatctttgccatcttgcatgctctccttctattgttagttttccatatgaagattttccattaccttcatgatgtgctgatttgccagccactctgccttatcgggatccttatccttgatcgcctttaagatgtccctgtgctcttctatggagcgctcggccctgtctttggctcctacggacatcatccttgccatctggacatatttatggaaatcggataatacgtgttccagtatacgactattagaggcttcgtacaagactttatggaactttccatccagttccgacacctgttcggcctgctcggcactctttttgcgcaggtggaattctgacagaagaatgatctcttccagttcttcgatctgcctgcctgtgatgtgttccgtcgcccatctggcacaaagcccttccaaaagagaacggatcttgtagatgtcatgcacatcctgaggggtaattcccgtgacataggctcccttgttcggcacaatcgtcaccagtccttccagttccaactgccgcagtgcctctctgaccggagttctgcttacacccagttcttccccaatacttacttcccgcagttcgtcatgctctttgtagacgcctgtcaagatatcctccctgattttttgaaatactcttccacgcaatgagtggtcatgatactcttccattcctacatctccccaattagattacgcctacttcctggcatgtctcatgaatgaccttcagcagttcctcatccgtcagcgatgtcacgcggccgttctcgtactctgcatcaacccactctttgaccttcttcaccagtttggaattcttgtccacagccttttcttccgacagtttgaagtaagtattgatccagtgggcaattcccgcaagcccggaagtattagacacagccaccagcggaggccggttcaggaacttatctgtatcaaatatattatatatttcctcatttttcaatagaccgtccgcatggattcctgcttttgtcacattaaagttctttcctacaaacggtgtctgggcgggaactttatatccgatctctttttcgtagtattctgccagttccgtaatcacccgcgtatccatgccgtccagggttcctcttatctgcgcatattcaaataccatggcctcaagaggcgtgttccctgtccgctctccaatgccgaacaaggagcaattgattccggatgctccatacagccatgctgtcgtagaattgctcactgctttataaaagtcattgtgtccgtggaactcgatcaattcactgggaactcctgcatgtatcctcagtccatagatgattcccgggatagaccttggaatcaccgctcccggataattcacaccatagcccatcgtatcgcagacacggatcttcacgggaatcttatactcattcatcagattcatcaattccaggcagaacggaattacgaaaccatagatatctgccctggtgatgtcttccagatggcatctcgggctgatccccgtctccaggcattccctgacgacagacaggtaatggttcatggcctccagcctggtcatcttcatcttgaagaagatgtggtaatccgaacagctgaccaggatgcccgtttccttaagcccaatgtcttttaccaattgaaagtccttcttgctggctctgatccaactggtaatctcaggaaaatcatagcctttttccatacatttatagacggcatcgcggtcctttttactatacaggaagaactcgcactggcggatcttcccattcgggcctccaagacggtggagataatcgtagatctccacgatctgcttcgtgctgtaaggcgctctggactgctgtccgtcacggaaagtcgtatctgtgatccagatctcgtccggcatgctgtgaggcactatacggtcattgaacgcaatcttggggatctcgtcatagcggaaaaggttgcggaagatgttgggcttttcaatatccaccaaggggtacatatgctcttctaattgcagcaggttcgaatgtttatccagatacactttcctatcttccattttctttctctctcctttataggcattatgttatagtaaagcattaaactcaatatgtataattgtatacaattatacactttttgtcaatatctggatgaaaaaatacagggatttctaatccgttgttgctaaaatatgatcctgcttatttgccataatgggcagtgtgattccaacgaatcacactgcccattataactttcccgaaaaagaggccctttttttaactagattatgtcgtcacaaaaaatatcttctacaggtcaagatgcaactcataaactttcgttggacgccctttcgtgttggttgtccgtgcataagcaattctggcaacaccacctttctccatattatggagaatccggttggcgttgcgtatggttcctcccaaacgactggccagttcctgcgttgtaattgtatctgattcattcatcttcatgcatgcaatcaccttcctgacagtaatagtggaaaggctgcatttttttgcgatagcacccacctcttgaatataatgtttctccatgatcgtcggattatcggagcagagagatccgatcaaatcccctttttcgttcatgataaaactacctccggcaaatattgcttctttgctggcagagagcgcatttttaatagccatatcaagattgattccaataccgtatccgacagcaactttgaagccaagttttgcttccagatagatgctgagtttgcattttctgcatctccccgtaagatgatccatcatctgtacggtggttatggcagaacagtgatccttgcttttataggaagtacattccatcaagtttttcctgagaaattccttaatatagcgatcgatcagacttagattatctgagttgcacagttcagaatcataaggaactgcattgatgacaaccggaagatttgcatgcatatgctccaattctactttacaaagaagttcttcaatcagtccttccagtcggatatctgacggatagggataaaagtaagcaattccatgttcctccaatgcaggtataatattactgtattgacagattaccaggtcgatggcatcctggttccacagatgaatggccttctggatggtctgctcttcgattgcctgaatctgtgcgctgtcaagtgaattaatccatctttcaataagaggagaaatcggacgaattccaagttcttttagaaatgcatccgcagtaatctcatttccaattggaattaaaaaatcaagaacaactcgtttcagatcctgattccgattctcaagcagcaaatccaaaatgcttttgtaaagtcctgcaagatcaatatccagagaaaccatgggtcgcataatctcgtgctccactgcctttattgcatacatagcgattttaccacttataagaaaggcatcagcatcagcggcataagtatcatatacctctggaatattggtgaaattatcataagttaccaatttaatttcacagtctgccttaatgcgggaaaggatttcccgaatgggattatgcaggaaatggctggtaattactattattctagtcttcattatatcaccccttgtctatcttaacctaaagtattctgaaaatcaattctcttcttccaaaatcgtcaaatgttacaaaattattgatttagtttcaaaagttatctgaatattattgacgtcaaaaaatgaatattgtaatattctaagtgtattactgttctttaaatattctataattaacaaaagtataaacagtgtactaaaaaaaataaggaggagcatatgaattatttcgaaaaagcaacggaacctatatgaaaaaagtggcagtgaagacggcagctgtgtatggaggttctgtggaaattgagatgacctcagaagtagctcctcttatctgtgtgcaggctatacggatgaacgaggagagcacaatactcataacccaaaggtacagttcaatgaagaagtatgcccaattgaagtatcctgtctggcgcactgcgcaacccagtggttaaagaaccatcaatagaaaaaaattcaggaatgaggagaaaaatattatgtctgatgtacaaactaatgtagcaattccattgccgaaagcgaagaaaaatatggtacaactaggatgtatttgtctgatgctctctatcgcaatgttcggcttgagccttgcaaccttgcaggcaccagttttggaagagatgaatgccatgaactatttctcattacttaccatcttttcttcccttggtcttgcgattatgacgcccattggagggaaactaggagatttactgggtagaaggaatatcgtaattatctctgggacaatctgtgctgtctgcggtatcggaatgggcttcgtccgagcactgataccgtttatgatcttacggcttcttcttggagccgcacagggagcctttaccgcagcgccatatattctcgttcgtgagattaatgaaccaaaggatgttccaaaagcgatgggcctgctatccagttctattgcagttggtggcttcgtgggaagtattatcgccggtattttaacagatatgggattcttgaatattgcgattatgttcccagcgattccgttaattatcggcgttctcttgattggaatgaatcttccaaataagaagcaggaaggcaaagtaaatgtagatgttcctggtatcgtagctcttacaatcgcattatccggtatcctgcttgcccttaattatggtcctagaatcggttggggagatgtgaaaatcatcgtaggatttatcatcgggatcattgctgtgtttatatttgtgaaagttgagaacaaatctcaggagccagttataccaatgcatttgttcaaaaataaaaattatatctcattgttagttgtcggattcatctgctatttctatatgaatgcaatgaatacttttgcacctctggcagtgcaaaaagtgatcggtagttcaaccgcggtatctggtgctcttcagatgcctcgcactatcattacaatagtcctgccgctgattgccggcgcatgggttggtaagaaagcgcaaaatgtatggaaatccatggtgattgcgacgttgcttgttggcgtgccgcttgccgtacttggatttacgacaacgaatacttctgttatgatttattttgtggcgatcgccatcacaggtatcgcagagagcttccgggcagtttctatcacccctgcagcacaggcaacgctggagcagaaggaactgggcgttgggacttctctggtaaactttgtaaactcattgtccggattgattgcggcggctgtatttggtatcgcctatgatatcaatacaaaagcagatccgcagagcgtatctaatattgcagctggcgttaattcggtattcttgatttcagcattggtaagtatcgttgggctggcaattgttctcttagtagtaagaaaacagatgaatgcccaggcaaaagcagcataaatcctgttaatgaattccatgtacacctgaaatgagacaaagagagcattcctgcaaggaaacttggtattgaaagccaaaattgctgcaggaatgctcttctcgtatgtaagagggattaaaaatcggttttaaccgacaaacccgctgtttttctgcatgatagcagataattcatgatgcaattaaaaaagcgattaggaaggaaaatatcacccgctcggctgtcatctttgtacaatgacggatcttatttttgggaccgccgctatagcgattccgatcaccagcagtaaggctcccagaccgcctatgataagaatcgctaaattttcaggcgccatttttaataaagcttagcgccgatttcgcgaggacggaatccttcatcctccagcgctttcataatctcatgcttatgctcggttccaaatgcctccatcgtaatacgcagttccacagccgcattacggttggtgcttacaaactggttatgatccagcttgatgacgttgccctgggcgttggctatcgttgccgcaactctcaccagctcgcccggcttatccggaagcagtacggatacggagaagatcctgtctctctggatcaggccatgctgtacgatggaagacatggtaatcacatccatgttgccgccgcttagtacggacactgccttctttcccttcagatccagctgctttaacgccgcaaccgtaagaagtcctgaattctctacgatcatcttatggttctctaccatatcgagaaaagcgccgatcagttcatcatcttccaccgtcagaatacggtcaatgttcttctgggcgtatgggaagatggtttctcctacgcgctttactgcagttccgtctgcgatcgtattggcgctatccagcgttacaggccctccggccttgatagccgccgtcatgctggccgccgctgccggctccacgccgatcacctggatctttggattcagcatctttgccagggtagacacgccggtgacgagtccgccgccgccgattggtactagtatgtaatccaccgtaggaagttcctgcacgatctccatagcgatggttccctggccggtagcgatatccaggtcgtcaaacggatggacgaacgtatagccgttctcctctgccagccggatcgcatgcgcgcaggcatcatcatagacatcgccgtgaagcacgacatctgccccgtaactcttggtacggttcactttgatcagaggcgtgatcgtgggcataacgatggttgccttgcatccaaacttctgggcagcgtatgccacgccctgggcatggttgcctgcggatgcggtaatcaaccccttctcccgttcttcctcgctcattgtactgatcttgtaatatgccccgcgcaccttgtatgccccggtatactgcatattctccggcttcaggtatacttttccgccagactggctgcttaaatattcgctgtagaccagttttgtaggggtggttaccttttttacaatttcacttgcctgttcaaatttgtccaatgttaacattgcaattccctctctttctctctcggtttggctgggttatcattactctatgcttgtctgaaaaagtgcattgacaaaagtgtctgcatcaaatttctgtaaatcttcgatggtctcccctacgccgatatattttaccggaattcccagttcagcctgtatggcaaccgcgattcctcctttggccgttccgtccatcttggtcagtatgattcccgtaatatctgcaacttcattgaattccctggcctgttgcagggcattctgtcccgtggtagcatccagcaccaccagggtctcccggaaggcctccggatattcccggtcaatgatacggttcatcttcttcaattcttccatcaagttcttcttattgtgaagccgtcccgccgtatcgcacagcagcacgtccgcatgccttgccttggcggcggccaccgcgtcgtagaccacggatgccgggtcggatccttcctgtcctccgatcaggtcagcctgggcccggttagcccattcctttaactgctctcccgcagcagcgcggaaagtgtctgccgccgccagtactaccttcttattctgtgcccgcagttttccagccagcttgccaatggtggtggtcttgcctacgccgttgacgccaatcaccatcactacggatgtctgatcttcaaattcgtaggctgtctctcctacgtccatctgttctttgatgctgtcaatcaaaagctgcctgcactgagatggctctttgatatgctgctcttttaccttagccttcaggtcttccaggatatcataggtcgcggtaactcccagatcccccataatcagcacttcttccagttcctcataaaaatcatcgtcaatatgggaaaagccgctgaaaatgctgtcgatgcctgatacgatattatccctggtctttccaaggccagacaccaggcgcttgaaaaagcccatgctttctttctgttcttctgccatatagtcctcctattgatctaattcgtcttccagcaggcttacggataccagcgtggatacgcctttctcctgcatggtgattccatatagcctgtcggccgccgtcatggttccccttctgtgggtgatgacaataaactgtgtatttttcgtcaatttatgcagatactgggcaaacctgcctacattgttgtcatccagcgccgcctcgatctcgtccagaaggcagaacggcgatggcttcaggttctggatcgcaaaaagcagggcaatggctgtcaaggccttctcgccgccggagagctgcatcatgttctgcagtttcttccccggaggctgggcaatgatccgtatgcccgcttccagtatatcctcatcttccatcagttccagcgttccttttccgcctccgaacagttccttaaatacggtatcgaattctttcgcgatcagctggaattgctcctggaactgcttgcgcattgcaatatctagttcttctataatctgctccagggtagcctctgcctccaccaggtcatcatgctggcctttcaggaattcatagcggtcagatacattcttatattcttcaatcgcattgacgttgacattgccaagccctttgatctcgcttttgagttccaggatgcgcttcttcatctttgacaagtctgtaaggtttgtatcccgcagttctcttgcgcggttaaatgtgatctcgtattcttcccacatgtaattgatctgcttctccgaggctgcctcgtagccttccttctggctgtccagacggaagatttccttgtcaaggtcagacatatgcttcgacaggtcttcccgtttctgtaggaatactttgtgcttttgattcaagtcctcccgttcctgcttgaacttttcaatctccaactgaatctcggcaaacagatccttagaatcctcaatcgtctgccgcaggtccgcaatccggctttctttatcctcgatctctttggatgtcccgcctttgctttcttccagtcctgcaagttctgactggaacttttcaatctcttcccggatacgcgaggtattctccatcacaaacgtgaacttctgctccaagcttgcaaattccagatgaatcgcctcattgctcttaagcttcccggcctcctcctcgtgtactccattcagtacttcctgctctgcttcaatctgccgggtcagttcctgttccagcgtctcggatgtatccagttctacattgatggattcctggttatctatgatatccgtaatctgcgcatccagctcgtctgcttccttctgcgccgtctcggacatctctttagcattcttgatctttgccaaagcctgttcggcattcatcttagccgtattctgaatgacataatctctctgcagcttgccgctgatctcatccatcttctcataatatccggcccgttccctccgcaagcgttccgaggaggcttccatctcatccatttcccgtttcagctgcttgaccgtcttttcgaattcttcaatctcccgccgcctgctaagcaggttgctggagttcttgaatgcgcctccggtcatggagcctcccggattaatcagttcgccttccagggtcacgatccttagcgactgattgtacttcttggcaatggccgtcccatggtcgatgtgatctaccaccagcgtcctgccaagcagatagtctgacagggtctgatatctggcgtccactttgacaagcgtattagctgctccaatgacgcccggctcttttaacgcctcctgtctgctgataccgccgtttgcgcggatactagtaagaggaaggaaggtggcacgtccgtacttgttcttctttaagtactggatcattcgttttgcagtctcttcatccaaagtgacgatattctgaatgttgcctccaagcgccgtctccacggcaatctcatagtccttgtctactttgataatatctgccacgacgcctaatagcccaggctccttgtccttgttatccattacccgccggatgctgttgccatatccgtcataacgctccgtaatattcttcagtgattccagccttgactgttccctgtggtacgcggtctgtccaatgcggaactgttctgtctgcctggcaagcaaggcttgaagttcctggatcttcgcttcatacttgctattctcctcagacaggacgatgatctttgcagatacttcctttaactccttttgaaatccttccaggcgctcttcctgctcctgaatctcgctcctggcttcaatcatctgctgggtcgtccttgcttttctcacctggatctgttccagcatcgtgtcataccgctgaatcttcgccttagttgaggcccggctgttcagcagttcgataatatcgcccttattcttttcaacggatgccgtaatggtggcaatcctggtctgcacctcaatcagttcggccttggcctgctctttttgcttcgtcttctcttccagctgggcatggattgcatcctgctcggcttccagctctttcagctgcttctcccggatatcaatctcggaatcaatggcccttgcacgctggtcatagtgggcgtcattcatgcgggcgctgtggatctgctctttgagcaactcgatctggttctccaactgctgcttgagcatggtggtctcgctcaactggctttttgccttctcaatagatgcgtcaatgctatccacctgctcctctaccgcctcatactctgtcttcatgtcctcatactgctggctggctgcttccagctcgcttctggtaacagtaagttttccgtcgatctgccttatctggtcctgtatacggtccgtctccagcaggaacatgttaatatcgtaagtctttaattgttctttcttcttcaggtattccctggctgtctctgcctggcgctccagtggtccaacctgcttttccagttccgccagtatgtcgttgacacgcagaagattctggcgttcctcctccagtttctttaccgacatgttcttgcgccgcttgaatttgacaatgcctgcggcttcatcaaaaagttcccggcgttcttccggcttgccgcttaatatcttatcaatctgtccctggccgatgatggaatatccttccttgccgattccagtatcataaaacagttcatttacatctttgagacggcaggcacttccattaatcagatactcgctctcccctgaccggtacagtttgcgcgctaccgtgacttcctcaaaatcgatcggcagctgatggtcgctgttgtccaaggtgatcgcaaccgacgcataactgagcggcttgcggttttcagttccagaaaagatgacatcctgcatgcttccgccccgaagctgcttgatgcgctgttctcccagcacccatctcacagcatcggcgacgttgctcttcccgcttccgttggggcctacgatcccagtaataccgttatggaaatcaaattttatcttatgtgcaaaagacttgaatccttgcacctctatactttttagatacattcttcacctactttatgtttttctcatgcagtttcaggatgctttggtaggcggcctcctgctccgcggccttctttgtacggccctttccaagaccatactcctcttccccgatgtataccattacatggaaagatttatcgtgatccgggccttcttccctcaccagccgataggaaattgtctctttaaagtttgcctggacgatctcctgcaggatagtcttgctatcaaaaaagagtttcttatcctccaggtcctgtagaataaaccgatgtataaactcttttgcactagcaaaaccaccatcaatatatatggctccaatcagcgcctccatcgcatccgatgtgatagactccctcttccttccgccggtagcctcttctcccttcccaagcagcaagtactctcctaaggacagttccctggcgcagaaagccagcgccggctcacagaccatgcttgccctcgtcttggtcagttctccttccggcatcttctcatgctcatagaacaagaattcgctggaaaccagttctaggaccgcatctcccaaaaactccagcctttcgttgcactcgtatttgggaaggtgcttctcatttgcataggaactatgaagcatggcctttttcaacaactgcaaatccttgaatgtatatccgatcttcttctctaattctttcaattcctgattcataatcttccccataaaatgaaaaagccctaccgggctttttcatcctctaaatgcctagttatttgttgcgtttttaatctgttcgacagcgtcgcctaccgtcatgatcttctcagcatcctcgttgtcgatctcaatatcaaatgtctcttctattcccataataatctggaagatatccagggagtccgctcccagatcatctacaaatgtagtctccatcgtaatatcatccgtctcgacgttcagcacgtccgcgatgatttcctgcaatttttcaaattccataccaattctccttttctcatacatagtgtcgtatttattcaacggatgccccatccgattgaatacattccttaatcttttcgttaatcttctgtcttttgaaggttacgcactgggtcagcgtattgcttacctcttttgcctttgcgcttccatgcgtcttcactacaaggccgtttagtccaagaagcggcgctccgccatactcgctggcatcgaaagtcttaagcgtcgccttaagcgccggcttgatcagcagggcgcctatcttgctgcgaagggttgtcatcatcccttcttttaccttctggatcaggactgcgcctacgccttcatatagtttcagtatgatatttcctgcaaaagcctcgcagactaccacatccgcctgcccgtgaggaatctctcttgcctccacgcttccgatgaaatgaattcctttttcttctttcaaaagcggaaatgtctcttttaccaaagcgtttcccttttcttcttccgctccgatattgacgatccctactctggggttctgaatgcctagcacatgctccatatagatggatcccatctttgcaaactggaccagatgggacgggcgggcatccacattggctccgcagtcaatcagcagagtcacccctttctccgttgggatcaacggtgcaagaggcggacgttccacgcccttgatccttcctatcaatacctggccgccaaccaggatcgcgccggaacttccggcagatacaaaggcatcggccttaccttcctttaccatcttcattcctaccacaatggaggaatctttcttcctgcggatggcatttaccggaggttctgccgtctcaatcacttcggtagcgtttaccacctcgatctgttctttattatattgataatttgcaagttccttttgaatgacgtcttcccgtccaaccaggaataccttcattaaaggttcttttgctatggcgtccatagccccttttatcatttctgccggggcattgtccccgcccatagcatccagtgctatgtttgtaatatcagacatttctattcctcctagcattgctaggattaattctactagacattattataaaaatcaatgattttataaagaaaataggaactgacaggcagtactgccgaaaaataccaaaaaatgccccgaacagatagcgcctgttcggggcattttgccttcctcattagtcctgaggaatgatttcttttttgttgtatgagccacaagccttgcagactctgtgaggcatcattaattcgccgcatttgctgcattttaccaggtttggagcactcatcttccagtttgctcttcttttgtctcttcttgctttagaagatttattctttggacaaattgacataggttacacctccttaaaattcttaaataaatcgcggataactgacattctagggtccaggcccgtatcttcgcagttacaggtaccttcattcaggttctgaccacatacattgcaaatccctttacaatcttcgctacacagaatttttgtcggccaccctactaataactcgttgtaaactaactggtctacgtcaaagttatatccgtcaatataattggtttcgtctagttcctccatccgctccacattctccaggtctaagcatacctttcttttaaaatcaagaggtatgtccacttccacatctgcaagacagcggtcacagggaatcgtcacgcgaacttcgccctttcctgctatcttaagttcctgatcgcctgcgtattcgatgcacagagccaaaggagacttccaaataatgggaaacgttcctgcttctgaccggaaacttgtcatctcgataggaacggactcttcaattgtgctatgttgttcggacagaacattggataggtctaatatcataactaatactcctattcacacctagactattatatcatgtagaatgattttgtcaacaccaatcttctaaactaatgcaactgtttcccgtgcaattgccaattcctcatttgtaggaattaccattacctgtacttttgaatctggcgttgagatagtaacttcttctccgcgtgaatcattagccgccccatccagctggattccaagatatccaagataactcatgatatccgcgcgtaccgggcctgaattctcgccaacgccggcagtaaacgcgatcacgtctactccgttcatggctgccgcataacttcctacgtattttgcaacacggtaggcaaatactttcagcgcgatggctgccggcttgttgcctttgcttgcagccgcatccagatcacggaagtcgctggagagattattggaaagtccatatactccggactttttattgagcatgttcatcagccccgcaatatcaagattctctttcttagcgatgaactctaagatggccggatcaatatctccggagcgggttcccattaccaggccttccaaaggcgtaaggcccatggacgtatctacggatttgccgttctttacagcgcagatgctggcgccgtttccgaggtggcatacgatcgttttaagctggtcatatggctttccggcaagttctgccgctctctttgatacgaaactgtggcttgtcccatggaagccatagcgtcttaccttgtatttctcatagtattcgtaaggaagtccgtacatatacgcttcctccggcattgtctggtggaatgccgtatcaaataccgctaccatcggcgtgccaggcattaatttctggcaggcattgattccgatcagatttgccgggttgtgaagcggagccaggtcattgcactcttcgatcgccttcataacctcgtccgtgattactacagaacttgcaaacttctctccgccgtgtaccacgcggtgtccgactgccccaatctcgtcaagactttttacaactccggtcttagcgtccgtcaaagcgtcgatcacgaactggattgcttctgtgtgggtcggcatagccttatccgtcttcaccttctccccgccctgcggctggtaagtaagacttccgtcgattccgattctctcgcagagtccctttgcaagaacttcttcagaatcagagttgatcagctggaattttaaagatgaacttccacagttaataactaatacattcatttgctctatacctctcttttattattttccgttctatttactcttctgccattgcctgaacagccgtgatcgcaactacgccttcgatatcctttgcgctgcatccgcgggacaggtcattgacaggcgctgcgattccctgtgtcagaggtccgtaagcttctgcctttgcaagtctctgtaccagcttgtatccgatatttccggcatccagatctgggaacacaagtacgttggccttgcctgctaccgggcttcccggagccttggacgctcctacggatggaacgatggctgcatccagctggaattctccgtcaagaagcagtccctccggagcattctccttggcgatgcgggttgcctctacgactttgtcaacatccgcatgctttgcacttccctttgtagaatgtgaaagcagagcgactatcggctctttctctgtcagaagcccgaaagattctgcggaagaaagggcaatggctgccagtttctcaggatctggattctgctccaggcctgcatccgcaaatacaaatgttccatctgcgcccatatcacagtccggtactaccattacgaagaatgcagataccagtttggttcccggcttcgtcttcaggatctgcaggcatggccttaaggtatctgctgtcgagtggcatgctccggataccatgccgtctgcatccttcatcttaaccatcatgactccgtaatacaggtagttggtaagcagcagttctcttgcctgctcctctgtcattcccttcttttgtctgagttctaccagttttgcgatgtatgcatccgttttttcatatgttgcagggtctacaatcgttgctccggtaatatcgaaagaacctttgttcttagcgatctcttcttcgcttccgaccagaatcaggttggcggtcccctctttcagtactgcttcagcagcttcataagtcctgatgtcttctgtctctggaagtacgattgtctttttgttcgtttttgcttttgctttgatttcatctataaatcccatgattgatagactcctttccattccatattttctcagtatttctattataatacaaagagaccttgcaaacaaggtctctttatagaatcttctgtctatttttgcatacaatctcctacagggcaaatgccgtgctgacaatggcaaagtatacgctgatggtactgatgtctaccagggtagaaatcagcggcgtagccatgatagcaggatccagtcccaccttctttgccagaagaggcagggtacagcctaccactttggcgatcactaccgtgcaagccatggtaagcccgatggtaaatgccatcattgcatccccttgtcccatcagcagaatccgaaggccgttaaccacggaaagaatcaggctgatgcaaaccgcgatgcgcacttccttccagatgaccttgaacagatccttaaactcgatctcaccgaccgccagaccccggatgaccagcgtggaactctgggagccgcaattgcctccggtaccggtaagcatgggaatgaatccggccagctgcggcatgaccgcaagggccgcctcataactgttcataatcatctgcgtcaccgtggcggacagcatcagaaacagaagccagggaatgcggctcttcacatgctccaataccgtcgtgccaaagtaagtctcctcattcggattgacacctgccatgatgctgatatcttccgtcgtctcttcctgcaggacaaccatggcatcgtcaacggttacgattcccaccatgcacatctcatgatccacgataggaagcgcgatcaggccgtacttggtgatggtccttgccacgtcttcctggtcatccgtcgtatgcgcatacagcatattcgtgtccatgatctcttccaccgtcttggattcgctggtggtaagaagttcctttacgtctacctggccgatcagcttgcgcttctccgtgacatagcaggtatagatggtctctttattgataccgacctggcggatcttcaggatggattctgcaaccgtcatctcttttcgcagcgcgatatagtccacattcatcacgcttcccgcgctgtcctccggatactggagcagctggttaatctggactcttgtctcctcatccgtggccatcagaagcctgtccaccacattggccggcatctcttccagaacgtctaccgtatcgtctaagtacatctcttccatgacttcttccagttcggaatccgtcagtgcattgatcagcagctcgcgcatatcgctgttcatatacgtaaatgtctctgccgcttcttccttggccagaagcctgaataccataaccagatgcttctggtcaaaattttccagtatatcagccaggtcaatgggatacatattattttcgagttcttcttttaattccttatactggcgctcttccagcatctccagtatccgttcttccgtcagttcctcccgttcttccagatagtccgtttctgcaagatccggcatgttctttgattcttcgaccaaatcttcaaccttttgacgggcggccttccaatcttcgctcatctatgcatcccctcctctcctgtcattcattgcatccccaatctttctatagtataatcaatttcaaaaggatatacaaggagattctcatgaaaatagtaggattgatcactgaatacaacccatttcacaacggacacctgtaccatattcaaaaagcaaaagagatatccggggcggatgccgcagtcgtcgttatgagcggcaactacgtgcagcggggcgctccggccatcatgcccaagcatctgagggcagaggtcgccctcgaagccggcgtgcctgtcgtcatggaacttcctgtatgctacgctgctggaagcgccgaatattttgccgcaggcgccatctcactgtttgagcagctgggctgcatagactccatctgttttggcagcgaatgcggagactacaaagttctggaacggattgcccgcgtgactgccgacgagccggaggaatacaagttctcccttcaggaggcattaagaaagggcatctcctttccccgggcaaggcagatggccttaaaggcctatttaaaggatgattccctggatgtcatactggaacagcccaataacattctgggcattgagtacatcaaggcgctctacaagaaaaaaagcagcatcaagacttataccatcaaacgcatggtatccggctaccacgatgaggaactgactggcagctacagttccgcgtccgccatccgcaaactgctggcctacgccagcagttccatccatctggaggaagaaggcatgtttgacgagcccgccatgtccgaggtgctgacccggctggaaggccaggtgcctccgtcctgtatccgccttctggaagagatgcaccgtaccaggtatccaatctactccaatgacttttcacttcttcttaagtacaaactgctgaccgagaccagcgatactctggtcaagtacaaggatgtgaccgaggacctggccaaccggatcatgaaccatgccaatgatttcatcacgtttgaccagttctgcgatcttctcaagacccgggatatgacctacacccgcatcagccgcagcctgtttcatatcctgcttgatatcaccaatgaagacatgctctcctatcaggaggaaggctactgtcagtatgcccgcattctgggattccgcaaggatgccgggcagatcctctcctgcctgaagaacagttcctccgtgccgatcatcaccaaattgacccagacggaagacttaaccccggtggggctaaatatgctaagcaaggacatcttcgcctccaacctctacgaaagcatcattacgaacaagttcaagctgcctttcatcaatgaatatcagcatcagattgtgagaatctagacgcgttccctggataagaaaggcagctgccagaaaaagattactcttttccggcgcctgcctttttcatgcctctctattcaattacccgactgcaggcaactgccattgccccgctgccgatatggcaggccacgctcaaggacagcctgtccaactgtatctcatagcccgggaatttcttctcaatctcagacttccatgcctgcgcctcttcatccgagcaagtataggcagcttccagatgtacctttttccccgcaaaacgtccgttcatatccttttccattgcttccagcatcgtctttttcgccgctttccagccccgtactttggcaaaggagtccagtttttctccctggatctggagcaccggcttaatattaagcaccgttccaagcgctgccgcggcaggcgttactctgccgcctttcttcaggtatttcaacgtatccacggtaatatagatgctggcttccagccgttcgcgcatcagggtctcctcaatctgcgcggcactcagcccccttgaagccatttcaatcgcgtccagaacagactgcctctgagttaccgatatcctctggttgtcgattacatgaacctttccgtcaaactcctgggcaagagccattgctgtctcgcaggaactgctcaggccgctggacatcgggatatggatcacttcatcataactctccagtaattcctcccataattccatgacatctgcaggcgccggctgcgaagtagatatatccgcatcttccgccagcctctcatagaactcttcctggctcaaagtgatatcctcataatagagttccccattgatatagaacggcatcggaatcacctggattcccaactccttcgcttcattctgggtaataccgctattgctgtccgtgacaactgctattgttcccatccaaacatcctctctaattcttaaaactgtgaatcggcgcagggattcttccctgcctgtttacaaaggcgctgcaatcatactcattcaccggcatgattggggcatagcccaggaggccgccaaattcagccgtctctcctacgtctttgccaataaccggaatcaggcggactgccgtcgtcttctgattcaccatgccgattgccatctcatcggcaattattccggatattgtagttgcttttgtctttccaggtatggcgatcatgtcaagtcctacggaacagacgcaggtcatcgcctccagtttttccatggtaagggctcccatcttcaccgcatcgatcattcccttgtcttcactgaccggaatgaatgcgccgcttaagccgcccacataggaagaagccatgacgccatcttctttacttcattgacttatcctcctactgtgccatgtcgctataatgatataatatctgatactatatccctctttgctaccatcatagggatatcttctcctttatatgggttgtcgccgatgctgacctccagcttgacagtctcgtaggccagctcttcgtaattgttctccttactcagatggcccagcaccacatattgaaggttgtcatgcagtatatcacaaagaagcctgcctgacaattcatttgacaaatgtcctttatctcctgccactctccttttaagaggatagggatagggacccacttcaagcatgtggatatcgtggtttgcctccaggactaccgcattcagatccttcagatgcgctaccgtgtattcgtcgtatttccccagatctgtcgctaccgccacggatttcgtctcattctcgatccggtatccggaaggctccttggcgtcatgggagatcgcgaaaggccgtatgctcatgcctccaagcgaaaatgtctcatccaccgggacatcatgcagcagtccttccggcatcttccccaggcttgtgcagcatcggattccttcaatcgtcccccgggtggcatagatgggtatcccatacttcctgctgaatacccccagcccctggatatgatccacatgctcatgggtgatcagaataccgttcagttcttctcccttgattcctaatgtatgtaatccctgttcaattctcttcttgctgattcctgtatccaccagcagatgagtatcgtcatctcctacgtagatgcagtttccgctgcttccactggcaatactgcataatctcataatctgtctattctgcctttcttataaatctgctaatatctgatccagctgcatcttcgtctcctcaaagacgccgttgttgtcgatgactctgtcgcaatgcttcaggaatacatccttcggcagctgggcggcaatgatatcgtccactttccgggcatcatagcctcttgcgtagatcagccgctttttgcggatctcgtcttccacatagacataccacagttcatcgcagatctcttcataattatcttcaatcaaaagcgctgcctccacgatgaacagattcgtattcttccgctcctctttggctatcttcctgcggatctcttccttcaccgcaggatggatgatgccattaagcatggataattcttctttcttcgaaaatacgatttctgccagcctttctctgtcaagctcgcccttctcatccaggatatccgtcccgaaatgctccacaatggcctcaaagcatggggtcccctttttctggagtttcttccccacttgatccgcctgacagatggtggctccgtatttgttatttaggtactccagtatctgcgtctttcctgcccctactccgccagtaattccaataatcttcataagtctgcacctctactttgcttcgtaccagttttctccagtatgcatgtctatctccagcggcacatccaaagatgctgcctgctccatctcttctttcagtatcttctttacctggtcaagttccggcttgtacgcctccaccagaagttcatcatgaacctgcagcaccagccttgacttcatcttctgctccttaagccgcctgcccactcctgtcatcgcaatcttgatgatgtccgccgccgttccctggatgggcgcattcatggcaaccctctcgccgaaagagcgctgcatgtaattgctggaagacagttccggaaccgggcgcctgcgcccgaacagggttaccacataccccatctcttttgcatgcttcaccgtatcatccaggaatatcttgatgcccggataagtggtgaaatagtcttcaatatacttggatgcctctttcctggtgatgctcaaatcctggctcaacccgaacgaactgatgccatatacgattccaaaattgaccgccttggcattgcgccgctgctggtccgtaacctcgtcaaacggaatgtggaacacttgggatgccgtaatcctgtggatgtccttcttttccttgtaggcttcgatcagatggctgtccccggaacaatgggccagcacgcgcagctcaatctgggaataatccgcgtctacgaagacgaatccgtcttccgggatgaataccttgcgaatcagtcttcccagttccacacggatcgggatattctgcaagttcggctccgtactgctcagtcttccggtggccgtgatcgtctggttgaacttgctgtggatccgtccgtcttcccggatgtaattggcaagcccgtcagcataggtggactttaactttgtatactgcctgtactccaggatctttgcgatgatcgggtaatccggcgctagtttctccagtacgtccgccgccgtagagtagcctgtcttcgtcttcttgccccccggaatcttcatgttttcaaaaagaaccacgcccaactgtttcggagaattgatgttgaagttttctcccgcttcctcataaatatccttttccagttccacgatcttggcgcccagttggtcgccgtaatacttaagcgcctcagcttccacccttacgccgtttacttccatgtcataaagggtaaataccagcggcatctcgacatccataaacagtctgtccatcagacattccttcagccgcttccacagaatcccggatgcggcatacgccgtataggcttcatagcatgccttcatccaggcatccagtttatcttctataatcaggttcagttgttcccttgcaacatcctcataggtataattacttttcaggggattcagaaggtacgccgccaccgtcacatcaaaacagttatcctggcgggcaatgcggatatgctccagagcctccttgatgtcaaacatggcaaagcgccctgcatcttttgctacaccctccagctgttccagaagccaggatacttcgatcccctggcccgcgcgaatgcagtagacatcctttttagaaaaacaaagtccaatgccgtcaatcccggcctgccctgcgaaaagcggaagcacattccgggtatccttgaatatgcacgcgcctatctcatcggctccttttgctgccgcaaatatggcttctgcctcttttctatccttaacttcctgaaacgcatcctctacctggttggatggcgcggtcacatcaaaacgctgcagcagattcttaaactgcagtttctggaagtatgcataggcctcttccgtgtagatattcccaagttttgcctcttccagttcatatggaaaatccgcgtccacattgatcgtagccagtctcttgctcatgaccgccatatcccaatgttcctttaatgccttcgacgccctgggcggctttacctcatccacatgggcatgagcttcttcgatcgaatgatactccgtgataatctttgtcgccgtcttctctccaatgcttggcactcctggtatattgtcggacgcatcgcccataagcgccttaaggtcgataaactctgtgggagttacctgatagcgttccttgacatcctgggcataatagtcctccacttccgtccggccctgcttcgtcttgggaatgcggattttcacctgctctgtcgccaactgcaacagatcccggtctccggagatgacagacacttccattcccttctgctcgcatcgcttggacaaggttccgatcaggtcatccgcctccagccccgcctgctcgataatccggatgcccatcgcctttaacacttccttgatcaccggcacctgctggcgtaattcatcggccataggctttctcgtccctttgtattcctcatacatctcatggcggaacgtaggcgcatgtacatcaaaggcaaccgtcaaatagtccggcttttcttcttctaatatcttgaacataatcgtcagaaagccgtaaatggcattcgtatgaagcccgtctgcattggtcagatccgggagtccatagaacgcgcggttcaggatgctatgcccatctatcaaaacaatcttactattcatatcagattctccacctattttaaaattaccatattactatacaccatatccttcgtttttaaaaggagtttatttctacatgccggcaatctctttcagccgttcgatgattggcagatgctgggtgcactgtccttcgcactttccgcaggcaatgcattctgccgccttttccttaggaatgtcccaatgattgtcaagcctcgccaggattgccttgtcattccctgtcagtatcttctggttataggcatccatgtatttgggaatggggatctccttcgggcagcccttgcagtaggcgcagcctgtgcacaggtcattaagcgccactcccttgccttcgtattccttcgcgatctcttttgccggcttctcttccagatgttctaccgcttttactgcatcgtcaatatgtttcttcgtggtgcaccctgccagagtcaccgtgatctctttatgggacgccacaaaacgaagcgctgcctggggaaccgtcaggtctgtcccttccgtcagataccggaaggcatccggattggcgggaatcattccgccgcccagcggattcatgacgaccactcccatgcctttattgtaagccgcctcgatcccgctctggcggaaacgataattcagcgcattgtaccctatcagcattcccttaaacttgccggaatctaccactttctctatctcatttccctgcatatgggaagaaaatacgatatttcttatcagtccgtccttcttggcttcttcgaaaaagccgtataaggcatccatgtgcttctcccaggattccaggctgagcatgcaccacatatgataaaagtcaatatagtcagtcttaagcctttcaagggaaagttccagcctcctgcggaaatcctcctttgtcggatggtctcctacatgcagtgtgcccagatttgtcttggatgttacatatacatcgcttctttttacctgggatagcgcaatcccggtgacaatctcgctcttatcatagcaatagttcggagccgtatcccaatagttgatccccttttcaaaggcataaagaggaatctcggcgcacttttcaagcctccccgctttgatatcctcctcgtcataccgcatggtcccaagaccgatcgccgacacttttaatcccgtatttccatattgcttgtaatacatctcttcctcccatcccggagcagcacgctctccgcgtatctctttcttctgcacttgatgcaaatccgttatattataccataaacaactgaaattttgaataaaatttccagacaaaaggattgacaacccttccatttgaggttataatttatcatgttgctgccggagataacggtagtacaggcggatgtggcggaatggcagacgcacaagactcaaaatcttgcgggggtgacctcgtgtgggttcaagtcccaccatccgcattttgacgaagcgttaggtctcttttattaagaagggatttagcgcttttttgtttttgaatcttatagtccatgatttttgagttatgctaatagacaggggagtatttaaaaaccgcaattccaatatgtgaaattgcggtttttctattcgagttcgtttagcatcacccatggcgcacaagcaaaaggcaggcatttatcaagcaattacaaattgtcagcagggaacaaggtattatccagcttggtcagttcatcctgcggaatgtagtatactccgtcagagtcaggctttacgtgaacggttacgctctccttctctccgaaagtcggattcttcaccctctctgccataatgtcgtacatcctttgatagaagagttcattaatctgctcttctccaggtatctcttccatattcctgacttcttccgtaacctttgtggtcacttcatcctgtatgccgtcaaatccggtgaaaggctctaccgttatttcgatggaataggcatcgtcatcggcctcttttgcctctcccacctcatattttgcctgttttaccatatcgacgaacatctgcctgtaattggctgacagttcttcagaaaggcccaggtcattgagtccggactccttcatggtcgtgtcgatgttctcctcatacagttcttttgcctctttctcagaggacttggtccattctacatagtctttgaactcccccttatagttggcgtccaagacagacttggcataggactgagcgtcctccgcgctcattccgcacccgctcagcaccatcatcacaaggatgaccagagccgcaagcaatcccttcttcctcatctctttttcctcctttacttttatattctggaattattcttccagcaatttctttccaatatcaaagcagtcaaacgtcgcaaaataatctgccggcgtttccgcccttcggatcagctgcacggtgccatcctccttaagcagaagttccgctgattttagtttgccgttataattataccccatggagaatccatgagcgcctgtatcatgaataaccagcaggtcccccttgtcaatcttcggaagcattcggtctattgcgaatttgtcattgttctcgcacagcgagcccgcaatatcatacttatggtcgcagggaatatcttccttgcccattacggtgatatggtgataagctccatacatagccggacgcatcagattcaccgcgcatgcatccacgcctacgtattccttgtgggtatgcttctcatggatggctttggttacaaggcatccataaggccccatcatgaaacgccccagttccgtatagattgccacgtctcccatgccagccggcgtaagaacttcctcatataccctgcgcacgccgtcaccgatcatgcggatatcgttgggctcctggtctggcgtatagggaatcccgatcccgccggagaggttgataaacttgatatgtacgccagtctccatctgaagcttgactgccagttcaaacagaatcttcgcgagcatcggataataatcattggtaaccgtgttgctggcaaggaaggcgtggattccgaattcctttgcgcccttctccttcaatattttgaaagactcaaataactgttccgtggtcatgccatacttggagtctcccggattatccatgatgtcattactgatcttgaacaggccgccgggattataacggcagctgatggtttctggaatatggccgatggtctgttccagaaaatcaatatgggtgatgtcatccaggttgatgatcgcccccagcttctctgcataggcaaactcttccgcaggcgtatcattagaggaaaacatgatgtcctcgcccgtcactccaatagcctctgagagcatcagttccgtataggaggaacagtcgcagccacagccatattccttcagaatattgatcagaaacggattaggggtcgcctttacggcaaaatattccttatatcccttgttccatgcaaacgcttccttcagcgccttcatatttcttcgaagccctttctcatcgtagagatggaatggcgtcggatactcttttacaatctcttccagctgttctttggttacaaatggctctttcttcatacgttcttattctcctctcgtattgacagtaattttatctcattcgatagcgcggtcttgtataattcaacaaagttcttctggccggaatacaggcaggtgttcatgctcccctccccatactcgccggtaaggacatacttagaatccgcaatgatgccgatctgcatgcccctgttttcccctacataaaccttggcattctcaaaagtcgcaggctgatccgtaatgatcaccactttcttcttgctctccatcagttcttccagttcccgcacaagcagaagcagatagttccgtgtgcaggtaatatagactctcttctctacctgggacagcaggttgcgcatcttgtccagaatatgatttgcgccctctatcgttatgtatccttccagatgagtcttctctgtaggctcatgggataccagccattttttagactcctccagcctccgtatccggttcttgcagaattcctctaagggcaccggcacatatttgcgcgtggttccctcttctaccagataggacgcgcccttctccgtcatattcgccaatgaattatatgcattggaccttgatatgcccgtcagtttggccacctcataccctgtaaccttgccttcgacaagcagacactgatatatgctggcttcctgccgggtaagtccaaattccatcaaatattctacaaatgatgttttttccacctgatcacctcgcctttttcttatagtagttctctatgggaacactataatatatagaaagacggctgtcaatatgttttgaatttttttggttgtcgtatgcgtgtcgggagggggagggattcttgcgacgctactggggctgcgactaatgcactgatctgtaaggctgcaggagagtcgccgatcgcggctcctctcctacggcctaacatctcaggcatggattctccgccccatccgcttacctccagaatccctccccctcctgacacgctcccggcaattcgttggcaatactgccccggttattgactcgaatcataaaataataaaaaaccagtacccaggggagactgtaacatcatctcattcttcctttgtactggcctcttttcttttattttccatgacttccaccccaaacttcgaacggcgtacccaaatgcaggcgccaaagcgtcgcaggaatcatcctcctgccctcgccggcggcgccacaacttcacaattctccttaatccactaccgcaatccgcataatattgctgacgctggtcttttgagcctgtacgttcggggaagggattcctgccgtcagcacgataatatccccggactccgcgatctgcttggcacatatcagttcgatggctccattgcagatatcctccgttgtgctgaattctatggattttaatggtcttacgccccaatagatctgcattcttcttaaagtcgcctcatttggcgtcacgccgatgatctcggtcctcggcttgaactttgataccactcttgccgtcgcgccggatacggatggcgtaataatgcattttgcgccaaggttattggccgtggtaaccgttgcatgtcccaaagcgcttgacgtgctcttcatccggtgttcttccgcttttttgagaagtgtttcatagtccagatgctcctcggtattctctacgatatgcaccatcatctgaagcgcttccaccggatatttgccctgggctgtctcgccggacagcatcaccgcgtccgtaccgtcgtatacggcgttggcaacgtcggtaacttccgccctggtaggacgtggattgcggatcatggaatccagcatctgggttgccgtgatgaccggcttataattgtcattacatttctggatcatcatcttctgcagatagggcacttcctccgccgggatctctacgcccaggtctccgcgggctaccatgattccgtccgcgcagcggatgatctcatcgatgttcttaatcccttccgcattctcgatcttagcgataattggaatatatggcgcgccgcactcccgaaggaatgccttgatctccaggatgcactctgcattgcggacaaaggaagccgcgataaagtcaatctcctgctccacgccgaagcggatatcctctctgtccttatcggtaatggcaggcaggcgcaccggtacattcggcacattgacgcctttgcgctctccgagttctcctccattgattacggtacagacgatctccttggctttcttttcctttactttcaggccaatcagaccatcgtccacaagaatcgtgcttccaacctgcacgtcctcaaccagacccgcgtaagtaatagacactttgctctcgtcgccaacaatatcctctgtcgttaatgtaaagaggttaccggcctgcaagttgatcttcttcccatcttttaatatccctgtacggatctccggccccttggtatccagaaggatcgccaccggcttgttttcttcttcccggatcttctttagcatatccatccggtctttctgctcctcgtgatctccgtgagaaaaattaaatcttgcgatatccattccattctggaccagcgcccgcatcagtcctgcatcgttggtatttggtcccatggtacatataatcttcgttttcttcatattcttttgcttccctctctcgtttctattttacatgtgtatgtgtgaacagatgatcctggcaatactcatagttgccgttacatttcgagcaatagcggaactccaggctcggatcatccagttctgtccttccacagacagcgcatttgtgttttgccccattctcatatacgtgtgtggaacgctgcgcccgctccatcttcttcttgtattcccttttcctcttcatctctttaggcgaataaggattcgtattccttgcgctcataaagaagatcaggacatttatcacggatactgcggccgccagtgccgcgttcgcgctccctccgtttccgaacggcaggaagtagctgacaatcgcatagccaaagtagatggcgtcaatccaggcaatccatttccctttgatcgggatggcaaaatacagcataaactgtgcttccggaaataatgccgcgaataaaaagaacatggacataataatatactgtgaatccataaccaccggcataccggtcaatacatatactacgactgccgcaatcgcgtgaagcaggatgccctggatcacgaatacattgaatcggaacgttccaagcactgcctccagctgtcggccgatcagataatctacatacagcagcaacgcgcacaggaatatattggtagacggaggaaacgctaaaaatgttataatcctccatatctgcccatgcatgatcgcaacaggatcaaggcaaaggtattgaaaatatatcattgggttcagcatgacaattacatatcccaaagcatacagtatgacaatatagttgatgagattcggaatcgcgaatcttccaatctttttttccagtttattcagccaattattcataaaatctactccctgctttcttcgtttcacactgtagtcattctaccgttttgaggtttgtttgtcaattctaccatggaagtttaacaggttttttatatttctatcacatttgcgaattgtcatttcaaatattttgtcgtataatgttacaagttgtaaaccaaggaaacacatattaataagaagatacccttcctcttcccgaagccccagttttaaaaatgcgggcatgaacggacaatggatggatatacatttgtaataaggagttacatattatgagccagaaagaattatatacattagggattgatatcggctccactacggtaaaaatcgccttggtggatgagaataacgatatcgctttttccgattatgagaggcattttgcgaatattcaggagactctttccgacctgcttggaagagccatcttcaagctgggcgcagtccatgcttctcctgtgattaccgggtccggcggtcttacgctggccaagcatcttggcgttcccttcgtacaggaagtgatcgcggtatctacggccctgcagcactacgcgcctcagaccgacgtggccatcgagctgggcggcgaggatgccaagatcatttattttgaaggcggcaatgtggaacagcgtatgaacggcgtatgtgccggcggtacgggctcatttatcgaccaaatggcctcccttcttcagacggacgcctccggcctcaacgaatatgccaagaactacaaggcattgtactcgattgccgcaagatgcggagtatttgccaaatcagacatacagcctctgatcaatgaaggggcttccaaggaggatctggccgcttccatcttccaggccgtcgttaatcagacgatcagcggacttgcctgtggcaagccaatccggggacacgtagcgtttcttggaggaccgcttcatttcctgtctgaacttaaggagtctttcgtacgtaccctcaagctggatgacgagcacgccatcgtgcctgtcaactcgcatctgtttgcggcgatcggatctgccatgaactcgaaaaaagatctggacgtctctctccaggagatgcagaaccgtctggaaggcaagatcaagatggagttcgaggtagaccgcatggagcctttattctccagcgaggcggattataaggaatttgccgagcgccacgcgaagcatcaggttccggttaaggatctggacacctatacaggcaaggccttccttgggattgatgccggctccaccaccaccaaggcagccctggtaggcgaggacggcacccttctgtattccttctaccacaataacgagggagacccgctgggcacgaccatccacgcgatcaaagacatttacagcaaactgcccgagggcgtcgagatcgtccactcctgctctaccggatacggcgaggctctgatcaaggccgccctcctgctggatgaaggggaggtagagacggtatcccattactatgccgcctcctttttcgagccggatgtggactgcatcctggacattggcggtcaggatatgaaatgtatcaagattaagaaccaaaccgtagacaatgtcctgttaaacgaggcatgctcatcgggctgcggctcatttatagagacctttgccaaatccctcaactatacggtgggggactttgctcacgaggcgttatttgccaagaatccgatcgacctaggcacccgctgtactgttttcatgaattccaaggtaaagcaggcccagaaagaaggagcggaagtatccgatatttccgccgggcttgcgtactcggtcatcaagaacgcgctgttcaaggtaatcaaagtatccgacgccagcgaacttggaaatcatatcgtcgtacagggaggcacattctataacaatgccgtgctgcgaagttttgaaaagattgcaaattgccacgccatccgtccggatatcgcaggcatcatgggcgctttcggtgctgccctcatagccagggaacgatacatagactgcgaaggcacgaccatgctgtccatcgaggacattgaggcgctagagtactccaccaccatgaccaagtgcaggggctgcaccaacaactgccgtctgactatcaaccatttcagcggcggtcgcaagttcatcaccggcaatcgctgcgagcggggacttggcaaggagaaggcacagaacaggcttcccaacctgtttgaatataagctgaaacgttactttgattaccagcctctcggcaaagaggaagcaaaactcggcgagattggaatcccacgggtcctgaatatgtatgagaactacccgttctggtttaccttctttacgagcctgggctttcgcgtgattctttctccttcttctaccaagaaggtatatgagttgggaatcgaatccatccccagcgagtccgagtgctaccctgccaaactggctcacggccatgtgcagtggctgatcgatcagggcatccggcacatcttctaccccagcgttccttatgagcgcaacgagttcgaggatgccaacaaccattacaactgcccgatcgttacctcctacccggagaatatcaagaataatattgacgccattgtaaatggggacgtggatttcatccatccgttcctctctctccaaagcgaagagaccatctcctaccggctggtggaagaattatcttccaagttctctattcccgaaggagagatcaagtctgccgtgcatgcggcttgggaagaactggcagcctgccgccaggatatgcgcagcaagggcgaggaaaccatccggtatctgaatgagaccggcaaccggggcatcgtcctggccggacgcccttaccatattgacccggaagtaaatcacgggattccggaactaatcaactcttatgacatcgcagtgcttacagaagattccgtctcccacttgaatccggtagagcggccgcttaacgtcatggatcagtggatgtaccattcccgtctttacgctgcggcgaactatgtgaagaccaccgataatctggatctgatccagctgaattccttcggatgcggcctggatgcagtaaccactgaccaggtagcctccatcctgaacgactcggataagatctacacatcactgaaaattgacgaggtaaataaccttggcgctgccagaatccgtgtccgttctcttctcgccgccatccgggtaagagaacagagaaacgataagcgtaagatacagcctgccgccatcaccaaggttccgtttaccaaggagatgcgaaaagactacaccattctctgcccgcagatgtcgcccattcacttcgatctgctggaagtcgccttccaggcgtccggctatcatgtggaggtgctgcccaacgacaataagcaggcggtagatatggggcttaaatatgtgaataatgatgcctgctatccatctctgatggtagtcggccagatcatggaggccatcctgtccggcaaatatgacaccgataagcttgccgtcattatcagccagacgggaggcggatgccgtgcttccaactatatcggctttatccgccgggcgcttaagaaagccggattcgggcacattccggtgatctccatcaacctaagcggcctggaaggcaaccctggattcaagattacgccttccctggccctgcgtggaatctatgcggcaatcttcggagacatcttcatgaaatgcgtctaccggatgcggccttacgaggcagtgcctggctctgccaatgctatgcacgaaaagtggaagagcgtctgcaaggagttcctatctcagggctatccttccaggaggcggttcaagcaattatgcagggagattatcgaggacttcgacaataatctggaactgctggatgtgaagaagccgcgggtaggcgtggtaggcgagattctggtgaagttccttcccgccgccaacaatcatctggtagatctgctggagagcgagggggctgaggccgtggtgcctgatcttctggacttcctgctctactgcttctacaaccagaactttaaagtgtcgcacctgggtatgaagaagtccaaggcaaccatggggaatcttggcatcaaggctctggaatggttccgggagcctgccacagaagcgtttaagaagagccggcatttttatccgccggcaaagattgaagatcttggcaagatggcttccgagatcgtatctcttggcaaccagaccggcgagggctggttcttaaccggagagatgctggaactgatccacagcggagccgcaaacatcgtatgtacccagccgttcgcctgcctgcccaaccatgtggtaggaaagggtgtgatcaaagaactccggaggcgttatccaaactccaacgtggtggccatcgacttcgatccaggagcaagcgaagtaaatcagctgaacaggatcaagctgatgctgtccactgccaataagaatatggaagcaagccagaattcataatctggttcctagccaatgcgaacaaaggccatcagacatatgccgtatatatctgatggcctttttctattctaatctaagatacagcgttacttccccgccgcctgtctctttggagttggaaagccggatccttcctccttgggccgcggcaaacctggccgccgtataaagcccaataccgtgatggctcctgtcatggcggctttcatcaccttgatagaactgctctgtagcatgggccaagtctctggcatcaaatcccctgccccagtccgtcacctttgcagcaagatatgcctgcccttcttccaggacaatctggaggtctatccgtagttctttgccttcgggattatactccaaggcattgccgatcagattgttccatgcccgttcaatctggctgtaatcgcacctggcctctcctgccagttccccctttatggaaaggacttcctgcctggaggcagccgcaagaatccttgcctgctcttccagccgctctcccagttcctgacaactgatcttctcttctccggcggattcttttggggacagcagcatttctcgaagcatggcaagataatgctcgatttccgctatattcctcagaatatactgattatactcctgctcctctgctgcaaggcttccttcctccagaagctgcgcgtttcccttgataatcgtaaggggcgtcttgatatcatgcgccagagccgcgatctgctcctgcttctccttctcctgattccactgctcttccagggattcctttaacgcgcatttcatcttgtatagggaatccatcacctcattgatctccttgatatcggaatgttcctcgtcgaattccagatctctcctctgaatcttctgcgtcatctcattcatggcctcaagcctccgcgacagatgtttcccaaaactgcgcgccagtataactgtctgaaaaaggaacagcaggacaaagaggatcaccgtcatgatcaccggacttggcaggtaacggttccatgctgcgttcgtatatctggcctcaatgaaatagttaacgatacagagttccccatcttcctttgcaatgaaccgatagtatcccttgccccttgcatagatattatcttccttatagttcgtccacgcttccttggcttctatctccccataagtcccataaagataggtgccgtccttgtcgtaaacgccgtagccgcacccttctggaagaatctcttttgtaaccttgtcggcttgcttgatggcggaaacattttcgttcagccgggtctgcatatcatctgccctgcggatgcctcctgtattgatcagcacactgaaggcaaggaaaaggatgcccaggatcaaaagcgtattgacgcagaacaggctgatatatcgaatgaatatggctgctatcgtctttggctttctttttacttccatcggtatccaatcccccatacggtctctatcggcgcgaatcccgccttctggcacttaccccttatgttcttgatatgttctgtaatcgcggaactgtcgccttccccgtcatatccaaaaacatgctcatagattctgtctttggaaaacacctgtccgtggttcaatgccaggtactcgcagatcgcgtactcgcttttggtcagttccagcgcctttccttcatacaccgcttgttttgcctgaagaaggaactgtacgtctcccaccgagaccgcattcttcttctctcgtccctctcttcttagatgggccgcaacccttgcccgcagttctccgattccaaagggcttggtaatgtagtcatccccgccgatgccaaggccttccataatatccgcctcctgaaccttggccgtcaaaaacaggatggggcagtctacctggtcccggatgtcccggcacagggaaaatccatcctgccccggcatcatcacgtccagcaggatcagctggtacgcattcagattcacttctccgatcttcaaaggatcgcttaaaagcgtcacgtcatagccctcctttgccagcgcgttcttgatcagcatcagtatatctttttcatcgtcaatcgccaatatcctagtcattgcattgccttccttcatagagtccaaaccacaggaataccaggatccagatgcctgccgataccagcaggcagaccagcatagtttctcccttaaggcctgcggctgcgatctcttttctccctgagtaatataatagcagatatgaagtccatcttccagtgtaagcgcatgggacatactgccagattccttcccccaggcccgtaaggaacaatgccgccaccagggactcgctgattcctatgcacatagagatacctttggatgccttcaagtttaagaacagatggatcagatacaggtttgccaggcttactgtcatagccacaatgatggccatatacgcctcctggctgacgaatgcctttcccaacaggtaccggtatcccagcgcaaagccctccaccgccaggcagatagcgccaaatccccacaaggtaaggacgatccatttccccagcagcgggctgtgcttgcgggtcgtcgtgctcaggaacgtctgaaaatgattctgcgcctctaattccaccgacatggagcacagcacgcttgccaccacaggcagcgcgatggccagcacctgtatatagccgctgacctgccccatatcgcttaatgcggcgaaacgatagtagcccaggaagatagccgcccctgccgcgggaatcagcagatgaagaagcggcagcaaggtgtgcttcatcttccagaattccgcccttagcgtacgaaacacttctctcatttaacctctcaccgccctttcatatagtttccttccagcgaaccagaagacagctagccatattacggacgcggcgatcccaggcaatatagcgcttgtatccagtagttcctgcgagaatgtcatctctccgggtcttgccggaagcccgttgggaagcaccccgatcacgctgcacatcagcctggaggcaatggcctgcgggatcaggaagaaataggacttcaaggaagccgaggcggctatgacggagtatgtgcccatatttagaagcagcatcgggaagattcccataatctgctgaagcatcaggcagaatggcacctgccagacaaacgagaccagcagcagcgccgtcgccgccacctggctcccaagggacggatacactgcaaaagacatctgcatgccttttcgaaggatcgcggcaattacgacagacgcggcaaatatgataatcagagccacagcggcttcccgtatgacgtatagcaccttgccgtcccagacatgctttggctcttccggcagtgtaaggatgggacggttccccatcttcttatccctctgtcccgcaagcccgcatatcaggcttacgaaccctggaaacagcatcatataccaccagttgtaactgtcaatggtgaagaatctgttggtcagtacggctgacaggatcacgctgataagcggcatcagaatcgtcagtttgccgatggctgaatgacagttttttaacttttccgccttataaaatctatgcatgtctctccctccctgcctgctccatagcaatcttcataaataattcttccagatggttcttctttggcatcccgccctgatatcccagcgtcccgccggcaataatcccgatatagtctgccgtctgctcgatctcgcttaggatatgactggagacaataacggtaatcccctgttcgggaaatcttcgtatcatctggcgcagatcctggatgccgatgggatccagcccgttcaccggttcatccagaaccagcagtttgggacgattcagcagggcaatggcaattccaagcctctgcttcattcccaaagagaattctcccgccttctttttgccggtatcttttaagtccacttgatccagcacctcttcgattctttcatccggcacgcccaggatgatggcgcgtaccttcagattttcccatgctgtcaggttctcgtatacgggcggcgtctcaatgagcgccccgatttctgccagatcccttctggaccatgggtgtccctggaagcgtatctgccccgatgtgggccttaagatacctgtgatcattttaagaagcgtggacttgcctgccccgttggggccaagcagcccgtatacgcagttttcagggacgcacaaagaaatattttttactgcctcctggctgcggaatgttttggtcaatgtctgggtttctagtattgtatgattcatatctgattcctccttatgaggacagtatagaaggcatttctaaagaatttataaggaaatggaacgaagtttcctatgatacaaataaagagccggatatgcaagcagattatgcttccatctccagccccctatgcgctttgccatacagcgatgctagatcaaaactttattcagaaaatcaatggttcttgagttctgcggattgccaaagacttctttgggcctcccttcttccacaatcacgccatcgtccatgaagataaccctgtgcgccacttccttggcaaatcccatctcgtgagtaaccacgaccatggtcatgccctctgcggccaggcgtttcataacttccagcacttctcctaccatctcggggtcaagcgcggaggtcggctcgtcaaaaagcatgatgtccggattcatggccagcgcccgggcaattgccacacgctgcttctgtcctccggaaagctgcgccggatagacatccgccttttcctcaagccctacggtcttgagaagttcctttgccttcttatcggcttcatcctttgacatcttctttaattctaccggagccatggtgatgttctccaatacggacagatgcgggaagagattaaaatgctggaataccataccgatattctctcttaccttattgatatcaatgcttttatccgatatctggtagccgtccactacaacagtcccgtccgtgatatcctccagtctgttcaggcatctgaggaatgtgctctttcctgagccggaagggccgatgaggcatacgacctcgccttctcttatctccacatccattcctttcaatacctgaagcttgccaaaattcttctttagtccttttacgctaatcttactttccatatgacaccttcctctctaccagttttgctactctggaaaggatcgtgcataccaccagatagaataacgctacaacaatccagattgccataacccttgtggatgaattggcagcaatgatcttgccgttctgagttagttctcttggtccgattacagatatcaaagaagtatccttcaaggaaatgataaactggttgatgatggacggaagcatagtgcggaatgcctgcggaaggataatcttccacattgccttcctataaggaaggcccaggctccttgccgcttccatctgccccttatccactgcctcaataccgcctcggatgatctccgccatataggctccggcattaaaactgagcgttaccacgcctgcaacgaaggctgatgtaaatcctccgatcgccggccactggaactgcaggaactgcgtcagtccatagtacatgataaatacctggaccagcagaggggttcctctgacaatgtctatgtaaatattggcaatgaattgcagcggcttgatcttggaaacgttgaataatcccacaatggttccgatgatcgtcgcaaagatcagggaaaacaccgtcatctccagcgtgatcatcagcgctttgcaaaaagatggccaatattcctgtagtactcgaatgatatccatggtaagactcctatctacttcttaatgtatgtatctaatatttcatcatatttgccgctttccttcaggttcgcaagtcctgcattgaacatcttaagaagttccgcgttctcgcccttcataacagcgaagccataaggcgcgcctttttccatatctaaaggaagcttcagttccagcccgcgggaaatctcatatcccattaccggataatcttcaaaacatgcaaccgtatttccggttataacatcctggtacatagtagaagaatcttcaaactgtgtcaccgtaaatccatactggtctgcgatagactccgcaaatgtgcagccttccgtaccgagtttggctgctactgtcttgccctttaagtcttcataagaatcaatgtcagaatccttctttactgccattcctacgccggactgatagtattcatctgagaaatcatacttcgcttttctttcatccgtaatagacatgccagcgatcaccgcatcggcctgtcctgcctcaagagcgttgactgcggcctggaatccgacgatctgcagttcgtattcaaatccctggtcctcggcgatcgcggccaggatatccagatcgatgcctaccatatcgccttcatcattttcaaattcaaatggggcaaatgtcgtgtccgtggcaacctggtacactttcttgccgtcatctttgctgtccttctttttgtcagtctttcctgcatcttggctgtctccgcatgccgcaagtgagaatgccatcgtaagacataaaaatgctgccaataacttcttcatactcttctctccttctacttcattaatctcataattgtatgtctatggattttgtatttaatactcctattatacactgttccgtgctaaagcaccagcataatttttcgaatattcccactatttctcacatttccacgagatctggcttccatcgcttaccgccgtgatggttcctcttagatctgttcggtaaatctggacatcatcattttccaatttgtccagaacctctgaatgcgggtggccataccggttctcttttccacagctgatgactgcccacgtgggattgacagctgcaagaaattcatcgcttgtagccgtattgcttccatgatggccacactttagcacatcgcattccagactgcttccaaaacgctttaccatctcctgctccgacttcgcttcggcgtccccgcacataacgaaggaattctctccatgaaccagtttgatgccaacggaagaattgttcaggtcatcctggcttacaagttccggttcaggacacaggacggtgaattccgcgtcccccagcgtaaagatatccccaacttccgggtactttacatccacatcgtagcggctgatctcttccattacctcctggtaggtcatggtatcattggctacctccggcatgatcaccgtctgtacttcaaagttctccaggacattatcccctcctccgatgtggtctgcgtccggatggctgagaagaaggtaatccagtttcccgatcccttgctccttaagataggaaaccacccgctctccctggtcattattgcctacatccatcaccatgttctgtccgcctgcctggatcagcgtgcagtctccctgccctacatccagaaacgtgactttcatctcgccttcggcgatcgtatctgcaatcttcgcctccggctcgcccagcatgccagccacatcgtccaagcttgcatatcccgtggcaaccagcgcggctgcaatcacgaatgccacgatttttttaacgttcttcatatttttactccccttttctgtcttgtctcccctaatatgtatcaatccttcttgtcgtctttatcgtctgagcgtcttaggaactcgatgaaggcaaagataatggaaatcacggtaagcacgtcacagtcatctttacgcctcccaactgcaaaagcggaaagcattttgctttccgctcgtgatttatacagttccgatcccatcgttattgttctatgtcaatttctgcagtttagcactatataattgattctgtgtcaatcaggtaatagttctttccctcctagttaactctccttagagtgcttcaagaatagtctgttccccccctgaaccggaagttaacttcaaacatatttgtgtgctgcttgtgcgctacttgtgttctacacactcattttcaacacttctcagtacaactcacaatttctggaatcattataaaatgggcttttcttagaactttccagcctttgccgcttcttctacagaaaccgctactgcaaccgtcatacctaccatagggttgttgcctgccccgatcaggcccatcatctcaacgtgagccggtacggaagaggatcctgcaaactgagcgtcagagtgcatacgtcccaatgtatctgtcatgccgtaggaagccggtcctgcagccatgttgtccgggtgaagggtacgtcctgtaccgccgccggatgctacggagaagtacttcttgccctgctcgatgcattctttcttgtaggtacctgcaaccgggtgctggaaacgtgtcgggttggtagagtttcctgtgatggatacgtctacgccttccttgtgcatgatggcaacgccttcgcgcacatcattggctccatagcagtttactttagagcggagcccgtcagaataagcaattctctttacttccttcagttctcccgtatgatagtcatattcggtctgcacatatgtaaatccgttaattctggagataatctttgccgcgtcttttccaagaccgttcaggattactctcagaggtttcttacgaaccttgttggccttctccgcaataccgatagcgccttctgcagctgcgaaagactcatgtccggcaaggaatgcgaagcagtctgtgtcttcttccagaagcatcttgcctaaattaccgtgtccaaggcctactttacgctggtctgctacggaacccggaatacagaaagcctgaagtccctctccgattgctgccgctgcgtctgcggcgttcttgcagcccttcttgattgcgatagccgcgcctacgatgtatgcccagcaggcattctcgaagcagatcggctgaatcccttttacctggttgtatacgtcaagtccggcatccttcgtaatctgctgagcctcttcgatagaagcaatgccataactatttaatacttcattgattttatcaattcttctttcatatgattcaaataaagccatttgcttgtcctcctgattttctactcttttctcgggtcaatgattttcactgcgtctgcaacacgtccatactgtccctttgctttctcccaagcatcgttcggagtatcgcctgctttgatgaagtcagtaaattttccaaggcttacgaactggtaaccgataatctcatcattctcatccaatgcgattcctgttacatatccctcagccatttcaagataacgaggaccttttgccaatgtgccatacatggttcctacctgagagcgaagtccctttccaaggtcttccaggcctgctccgatcgcaagtccgtcttcggagaacgcgctctgtgtccttccgtatacgatctggaggaataattccctcattgctgtattgatggcatcgcagacaaggtctgtattcaatgcttctaaaatcgtcttgcccggaagaatctctgatgccatggctgcagagtgcgtcattccagagcatccgatggtctctaccaacgcttcctggataataccgtctttaacatttaatgaaagtttacaggcaccctgctgcggagcacaccagccgacaccatgcgtaaaacctgaaatatctttaacttccttagcctgtacccactttgcctcttccggaatcggagctggcccgtgatttgcaccctgagctacaggacacatcatttctacttcatgtgaataaatcattttaaaactcctttcaaatttgcatgattttctgtcgtaaggttcgttatatctttaacaccaaacttactttattttctcatattattcaatattcgtcaattgtcactttctatcaaattccacagttcattccccgtcatatatggtcgaatttcagcccaggagtattcggaaggtatccatccccgggaaagcctgccgccatcctcgcttcggaatgcaaaggtgaatccgattgcaagaccccggccatgtgaagcaccgtggctatatccgtgctttcaataatacgtatttccatattataaccctgtccagaaatcgctgtctgtcctgaattctgcgatctcgtcataatcaaacggcgccgtcacccagatgtagcccagattgttggcgtctccttctttgtaattcaggttatagccaatctcaattccatctgcgtccaggaagaaattcgcctcgtacacgccatccatggaatctccttccagcgtctttttcatggcatctttatccagttcagacagaaaagcgtcattgtccgcctcgtccctcatagtgtcagcccattcagccagaaaggcatcatccagcctgacaatgtccttgacttcatagacctttccgtctttgaggctgatattgcaggtccgcaagtcctgatcggaatactcggctccgccctgataactgtaatcctcgaatgctacgcttaacaagtcttccgatgcataggccaccttatactttacgtaactaaccagcgccggctgggaagaagacaacactcgctccttcatctcgtcagagggattgtcatagatcttatccaccgtctgcagcgcgcagttcttcaacgcctcattaaccttttcttccgctttggcatccttaagcccgctgatgaccggataattgacgttaaagtcaatcatcgtagtctgtttcttatcatcctgatatgtatatgcatcttctttcagatcataggacagaccgtccgcgatcttctgggggattgcgtcaatccctgtcaaatccccggcatccgtgctgttctgtccggctccctcatccccgaagtaatcatagtcatgatggtcatcataatcatggtctctgtcattatgattatatggctgcgtatatatgctctgctcccggagcatatgccttaccttcctgccaatggccactcctgcgatgatcagaaccagtaccatcgcgatgcacaccgcggtcacgatgatcacaggcgccttcgatttttctttcaccggctgcacgagtcccggtatcacttgcatctccataggaacatagcgtatgccatttacctgccgctcttcccccatcgcctgcatacccatgtgggcatacttgggaactgctcccggagcggcattcacagtgatcttgctgacacccagtttctgcgcgcaatagttatagacggcctggaacagcctccgtcctacacctttgctctggcaatcctttctgacatagaacaggcagatgtggcccacggacttcaccgccatggtgccacataatttagttccttcaaaggctccgaagaaggtaatctctcccttctggtacatgtcgctgatattgtcatacttaataaattcctgaaaatgggctacgccttccggcgtatacgcaggcgccacatcttctgcgaagacttcccatatcagatggagagccggaagaatctcatgctgctttaatattcttacgtccatcttctacctcctttcaagcaactcctcccggagcagcgtcaatgcccttgccaccgcatatccccggttcttgtccctattgcctgtaaaatagaattcctctacccttacatggccttttacatagcagccgatatagacaaggccgaccggcttttcctcggttcctccgcctggtcccgcaattcccgttatgcttaaggaagcatccgccccagcggcgaacgccacgccttctgccatctcgtatgccgtctgagggcttaccgccccatgctgcatcagcgtctccctcttcacatgaagcagacgttccttggcatcattggaataagtgatatagccttccttatagacattggaggcccccggcacattcgtgatcctgccggccagaagtccgccggtgcaagactccgccgtcgtcaccgtcatgccatctgcttctaacatccgtacaatggcttcctccagagtcacatcttcctccgtcgtatagatcttatcgccaaagcgctggaagagttcctccatcataggcgccatcagttcctgcgctttttcctcgctgtctgctttggccgtcacccgaagatgcacctctcctgtcttggcataaggcgcgatcgtcggattcgtctgggcatccatcaggtcagagatcatggtctctgccttgctttccccgatggagcagatctttgccatcttcgaatagatgccttccggctgcagtttattcagatacggcgcaatatcctgctcgaacataggcttaatctcattcggcggtccgggaaggagaatggcgatctttccattttcctccagaatcagtcccggggccgttccgttatggttatccactacctttgcgccttccggcaccaatgcctgcttccagttgttcggcgtcacctggctgctgtggacctgccgaaaatattgctggatgcgctccttggtatgggcatcctcatagagttccctgccaaataccttggccgtcacctcttttgtcagatcatccttggtaggtccaaggccgccgcttaagatcaggatatcggaccttgacagccccagccggattgcatcctccagccgctcctcattgtctcctaccacgctctggtaatagcaggataatccaagcagcgcgcatttttccgccagatatgcagcgttggtattcacgatatttcctaataatatctctgtgccaacggatatcatttctacagtcatctcttacatgcctccctgtgtcaatacttgtacgttctttgcaatatagtcaaacaaagatacgatcgtcagtattaaggatacccagatcagtatcgttccaatcatgtcaaatacaccgcccagatccgcaatcagcacgatgatcatgaacatctgggaaaccgtcttgaacttgccccaataacttgcggcgatcacgattccagcgtcagatgccaccaggcggaatccgctgataataaactctctggcaataatcacgatcacgatccacgcagccagtttcccggatggaatcaggcagatcatggcagagcataccagcagtttgtctgccagcggatccatgaactttccgaaattggtcaccagattcctagcgcgggcaatcttcccgtccagcatgtccgtaaggctggccacgcagaatatcaccagggcaatccacttattgactgctcctcctacatccgtcagcatgaaaaacacgaaaaacggtaccataatcactcttaatactgtcaacttatttggtaaattcattccatcaactctcctatcaaatcgtattctaaggcgccggtcaccttcactctggcaaaatctcccgacatcagttctgcctctgtatttatgaaaatgaggccgtccacattgggtgcatccttataagtccttccgacataggcattttcatcggccactttcccttcgatcatgaccagcacttcccggccgatcatagcctctgcctggtcaaatacaatctcctgctgcagttccataatctccgcctgacgctcttccttcacttcttccggcacctgatccggcatgcctgccgcaggcgtatcctcttccggagaataggtaaatacgcccagacggtcgaattccatctcatctacgaattccatcagttcttcatgctgttccttcgtctctcccggaaatccggtgatcagcgtggtacgcagggcaatgtccggaatctctcttctgagccttccgatgatctcttccaactgattcttggacgtccttcttcccatccgcttcaatatatcatcattggcatgctggattggcagatccagataatggcagatcttcttctcttccttcatgatctggatcaggttctcatcaatctcttccggatagcagtagagaagccgtatccatcggataccgctgatcctgcacagttcccgaagaagcctgtgcagggacttttctccatagagatcctttccatataaagtggtctcctgagccaccagaatcagttccttaacgccctgctcagccagctccccggcttcttttacaaggcgctccatcggaacgcttcggaaatccccccggattttgggaataatgcagtaagtacaatgcttatcgcatccttctgcaatcttcagataggcaaaatgcccgcccgtcgtcaccaggcgcctcgtatccaccagcggcagcgcgtcgatgtcttccacttccacgtggcctttgccagccagcgcttcctccaccgcttctacaatcttgtcataggatgtggttcccagcaccgcatccacttccggaatctcatccagaatctcctgctggtatctctgcgccaggcagccggtcacaaccagcaccttaagccttccatccgtcttgtactgtgccatctccagaatcgtctggatgctctcttccttggcgtcatggatgaaacagcaggtattgacgataatgatatccgcctgcatctcatcatccaccatccggtatcctttggcagccagaagtcccagcataacttctgaatccaccagattcttgtcacagccaagggatataaacaatatattcattcgttcctccttttgaaaaaccatgctctctataaagtaaaggtatttagaagaaaggcagataccgccccggcatctgccttgtattctcacatacgtattacgtattaatcctcttcctcgccgactactttgatcttcgcctggttcaattcgttgattgcgatggacaacggcttctcgccactctttgccgcaaccagcggcatagcgccgtctatcagttccctcgccctcttggcggtagccatcacaatagagtagcggctgtttactaccttggtagcgccctcttctacgtctttgttaacgaccttcattaaatctgtgtaagatgggtgtaacatgcttgttattctcctttcaactcttccttcatatgctctataaatgcctgattacgaaaacttcttctgtgctctccctgaatgatctgatgcacttcttctacgcattctgcaagtacatcattgacaatcaggtaatcatacttatccatgccctcggcctcttccttggcacggttcatgcggaactcaatcacatccatcgtctctgtgccacggcctaccaggcggtgcttcagttccttcgccgtcggcggagtcacgaacagaagcagcgtctccggaaacttctccttaaccttgagggcgccctggatctctatctccaggatcacgtccttgccagtttccaactgctcctccacataggcgcgcggagtcccatagtaattgtccacgtatctagcatactctatcagttcatctttcgcaatcattttttcaaattctttcaccgttttgaagaaatattccctgccctcttcctctcccgggcggggctttctggtggttgcagagatggacagcgcataattgtcatactgcttcagcagttctttcatgatcgtgcctttgccggctcccgagaaaccggatacgacaataagaattccttttttagtcatggtcttttcctctctcccactactcgatattctgaatctgctctcttactttctcaatctccgtcttcaagtcgatcccaacgtttgatacttccaggtcgttggccttggaaaggatcgtattggcctcccggttcatctcctgggcgatgaagtcaagcttgcggccaatcccggcctcttcagactgcagggtctccttcatatgtatgatatggctgcgcaaccttaccacttcttcatccgtgcagatcttatctgcaaatatgaccacctcggcggcaatccggctctcctcgatctgtgtatcctccagcagttcccgaaccttggcttccagcttctctctgtattctgccacgatcttcggcgtacgttcctcaatgtagcccaccagatccagaagcccgtctaacttttctataatgtccttcttgaggttgcttccttccagcgtcctggtctccacaaactggccgatcgcgccttccagcgcctttttaaggccattccagagttcttcctcgtcaatgacctgctcttccatagtcagcacttccggacagcgggacagcgtagatacccggatgtcattttccaaggagaactgctccttcatccggccgaagcagtccatgtattcctgcgccagagactcattatacttcagggacatctggttctcggtaaagtcctcataggagatgaagatatctacctttcccctctggatgctctgctttaacaaactgcggattgctgtctcgaaaaaattcagtttctttggcatacggatatttacatccaggtagcggtgatttacccccttcatctcaaccgtgaacttgcgctccccttccatcacttcgcagcgtccgaaccctgtcatactttttatcatgatatgaacctcttcttataatatatttgctatatgtctcttaattgccactgataattataagtcatttggcatatcccgtcaactatgttataatcttcttatttcagtaagaaaggacggacatatctatggcatttgacggaatcacagttgctgcaatggtccaggaactaaaaaatgcgctggcagacggacgtatcgccaagattgcccagccggagccagacgagctgctgctcaccatcaagactccgaagggacaaaaaagactctatatctcggccagcgcatccctccctttgatatatctgacagacgagaacaagccaagcccaatgacggcccccaacttctgcatgcttcttcgaaagtatgtcggaaatggacggattaccggcatctcccagcccaaactggagcgcatcatcatccttgatatcgagcatctggatgagttgggagatctgtgcaagaagcagctggtaatcgagattatgggcaagcacagcaatatcatattctgcgatgatcaaggcaggatcatcgacagcatcaagcatgtctccgcgcagatgagttccgtgcgggaagtattgcccggacgggaatattttataccggataccatggcaaagcacaatccgcttgccattgacgagtcttcctttggccaggctcttaaggagaagcccatgcctcttggcaaggcgatctataccagtttcacgggaatcagccctgcagtggccgaagagatctgctatctggccggcctggaatccggcataactgccggagacttaagcggcgatatgatggcccacctgttccggcagtttgcctactatatggaagatgtccgccaaggcgctttccatccggtcatctactatgaagggagcgcccccaaggagtttggcgccctgccgctgacgcactacaacagccttgcaaggaaggaattttcctccatctcccaggtgctcagtacctactatgcgactaagaataccctgacccgcatccgccaaaaaagcgcggacttacgccatgtggtacagacagccctggaacggaaccgtaaaaagtacgatcttcaggccaagcagttaaaggatacgcagaaccgggaaaaatacaaggtctacggcgaattgatcaacgcttacggctacgatctggctccaggctccaagaacctgactgcccttaattattacaccggccaggaagttaccattcccctggacccgactatgacgccccaggagaattcccagaaatatttcgccaagtataataagcagaaacgtacctttgaggcactctcagacctcatccaagagacagccgatgatatccagtacctggaatccatcagcaatgccttggacatcgcgctgagcgaggcagatctggcccagatcaaggaagagctgatccagagcgggtatgcgcgaagaaagttcaccaagaaaaaggtgaagctgaccagcaagcctctgcactacctctccagtgacggctaccatatgtatgttggcaagaacaatctgcagaatgatgaactgaccttctcctttgccgcgggaaatgactggtggttccacgctaaaggcgcgccgggctcccatgtcatcgtcaaaagtaatggagatgaattgccggatcgcaccttcgaagaagccgggcggctggctgcctactactccaagaacagaggcagcgacaaagtagagattgattatgtagagaaaaaacatgtgaaaaagcctaatggggcaaagccggggttcgtggtatactataccaactattccctgatgattgattccgatatttccaatataaaggccgtgcaggactaactgcgcggcgtttggttataatgtcattgtctatcgtttcaaatatatgaatctattatacaactttatacatggagcgttttcatctgaaattatatttctcaacaatattcttcataattcactttattagtatatgcaaattctacaaaataatatataatatacctagttccagtcagaaaatttctaacaaaataatttatgaaaaacaaaagcgaaagagaggtaacaggaatgattgattttaagaacagcgaatatgtaaaaatgaaagagatagaccccggatcaatatttgcagaagtccagccactgttaatcaatggcgaggaggtcatcggtgcttataaagccatgagagactactgtgtattcacgaacaagcgagtaatcgcagttaatatacaaggaatgaccggcaagaaaaaagacttttcttctcttccctattctaaaataacggctttctccgtagagactgcaggcgtatttgatatggacagcgaactggaaatgtatttcagcggtcttggcaaagtcaagtttgaatttacaggtagaagcaatatcgtacagatcggccagattattggaacctttgcattataatatcctttctaagtttcgactggcccggcatgaaaagccgggccagtcataattcctttcaatttctctaccacattctacaatttctattcccatcctctgctacaacaaacttaagaaaggagcgcggatatctgttccacgctcctttcctatacttatttatctgttcctctattcgtccttcttaccgcattccggccagataatccacgaactgctgcgctgtccggccggacaggccgccgtggcttaattcccacttgttggcttccagaaggagttcttcttccggcatgtctatgccgcttttctgtgccagttttcgcacgatctcctggaattctttcttatctggttttccgaaatagatggtcacgccgaatctggcgaccagggagagtttttcctgcaccgtgtcattggtatgcagttcttcgtcccggtctgccttgtccttgaaggtctccctgatcaggtggcgcctgttggaggtggcgtagatcagcacgttctccggctttcgctccagtccgccttcaatcacggctttcaagtatttgtattcgatctcaaattcttcaaaggacaggtcatccatatagatgataaatttataattgcggttcttaatctgagcaatgatatcgttcagatcctggaactggtgcttatagacttctatcatccgaaggccctggtcataatactgattcagaatcgccttgatggaggatgactttcccgtgcccgcgtcaccgaaaagcaggcagttgttggcttttcttccttccacaaaggctttcgtattgacgatcaacttcttcttggcaatctcgtatcctaccaggtcatccagatgcacatgggcaatcttggtgatcggcacgatctcggtaccctcttccctatgctcgattcggaaggctttgtgaagcccaaatttgcccacgccgaattctttataaaactgggtcaggatatccttgaactttcccggcgtttcggccttggcaaggcttctgctcaggtcgcagatgcggtcccggattctctggttaaatatcttgccgtgtccgctggtacctgcatagtcccggatcattgacaggcaatccacgcccatggtctcttccagcgcctgaaaaccatagtcaaagagttccttaaagatagcgaagtcatggagggccacttcgttgatgcttccctccaccggccctacgatctcgcaggaggtgctgtatgcattctcgtggctggcaagaaggtaggtcaggtaattgtgccacaggtttccttcgaatccatggctgaccgccaattccagaatctcattgaccaagtcaaagaggaggcctttcatgtcttccatattataataatcgttggcgtagttctccatcacgaaggtcatatcatttaatatctggccttcttccatatgtttgtacagcatcagttcattcgttctcatttgcctcacctcttaataatttcccagtatcttcaaattaatgctttcttcccgcaggccgcggatcgcgttttttaccgccggatccgccagatttccttcgaagtctataaagaagcggtattcccagttctttccttctaccggcctggattcgatcctggtcatgttcaggtcattatatatgaaatgagacagcaggtggtacaatgagccgctctcatgcggcagttcgaagcagatgctaatcttcttcgcgtctttcaggaatatcttctggttggtggctacgatgaatcgggtggagtttccctgatcatcattgatattgtccgccagcaccgccaggccatgcactttggccgcatatgcgctgcacacggccgcctgggtcttatcctgctcatccagcaccttctttgccgcgatcgccgtattggccacgctgatctgctgccagtcgccgtgctcgtccaggaagcgggatgcctgcatcagagccacgccttttgagtaaactcgctggatatccgacaactctgttcccggaagaccggcaagcgtattgacgatcgggatgattgtctctcctacgatatagttttcaaattccaccagcaggtcatacatctcatccacagagcccgccgtagagttctcgatgggaagcacggcaaagtccgccgctccttcttcgatggcttccatggcgtcccggaaggtccgcacgtaaaagttgttgcagtcctccccaaagtaattcttagtggccgcctggctgtatgcgccctccgttcccgggaatacgatcctcgcgttcttgtcatccagggaggacaccccgataaatggaagcctgcccagggcccctgccttgaccaactgctgatactgcagtttcctgctcatggacatcagttggtcatagagttcctgtaccgctttcttattaaagtccgtggatactttaccggccacctcctgaagcttgtcccgctctctctggcggtccagaactttccttccattttttaccttatattctccgacctcttcacagatgctcattctttcctcaaagagtctgaccatctgttcatcaacatcgtctaaccttattctcaattcctctaacgttggcatgtctttttctccttctttgcaaatcaagttgtattataatacatttttggtataaaatctaccttccgttgccatactaagacacatgaagcacaatttcttaacctgcggaacctgtgggtggtgcatggagattctattcaccggcctgcactccctgcagaacgaaaatcacaaacttaccgggaatacttccatctggatgttccccatctatggcatggccagtttcctttctcccatctgcagacgtttaaaaggcaagagtctggtgttacggggaggtgtatatacttgctgcatttttatcggagaatatattaccggctctttcctgaggaaatttgaagcctgcccctgggattacagcgaagcccggctgaatattaacgggctgatccgcctcgactatgcgcctctctggttctgcgcagggttgttgtttgaaaaaattctctgcagacgttgaaaatctttcatatttattatatgatgtatgaaagattttcaatatgggaggaaaacgagatgaacaccactgaatgtatcagaaccagaagaagcatccggaagtttaagccggacccgatagaccattttctattagaatccattatatctactgcatcctattctccttcttggaagaacagtcagatcgtccgttatatcgcaattgaagattcttctattcttaattcaatcatgaacaattacaccccagattttaattctaatattatccgtcaggcaccaatgctgattgctatgaccttcgtaaagggccgctgcggctttgagcgcgatggatcatttaccacgaaaaagggtgaccgctggcagatgttcgatgcaggcatcgcggcgcagacgttctgccttgccgcccatgaggccgggcttgggaccgttatcatgggaatctgggatgaggatggcatcacgaagcttcttgattttccaaaggatcaggaacttgccgcgctgatcgccatcggttacccggacatccatccggatgcgcccgggcgcaaatctgttgatgaattattaacatatcgataagaggaggtttatatgagacatttgatgagtccactggatttttccgtggaagaattagacaaacttatggatcttgcgggggacattgaggcaaatcctgaaaaatacgcccatgcgtgcgaagggaagaaactggcaacgctcttctacgagccaagcaccaggacaaggctcagccatgaggcagccatgctgaacctgggcggaagcatcctcggattttcttctgccgactccagttctgccgccaagggcgagagcgtttccgatacgatccgcaccatatcctgctacgcggacatctgtgccatgcgccatccaaaggaaggcgcgcctatggtggcatgccgccactcttcgattccggtgatcaacgcaggagacggcgggcatcagcacccgacccagactctcaccgatcttctgaccatccgatctttaaaagggcatctggatcacatgaccatcggcctgtgcggcgacttgaagtttgggcgtaccgtccactcgttaatccatgccctggtcagatatccgggaatcaagttcgtgctcatttccccggaagagttaaggcttccaggctacatccgctcggacgtgctggatcagaagcaggtggaatacgaggaggtcgtccgcctggaggatgcgcttccgaaactggatcttctgtatatgacccgcgttcagaaggaacgtttctttaatgaggaagattacgtccgcatgaaggatttctacatcctggatgccaagaagatggaacttgcgccaaaagacatgtatgtgctgcatccccttccgagggtcaatgagatctccgtcgaggttgacaaagaccccagagcggcgtattttaagcagatgcagtatggcgtatacatacgaatggcattgatcttaacgctattaggaatcgaagtatagggaggaaatcaattatggtaaaaaacactttgaatgtaggccggattgatgaaggctttgtattggatcatatccaggcaggccgttgcatggacatctataaatacctgcatctggataaattagactgctgtgtcgcgatcatcaagaatgccaagagcaacaagatgggcaagaaggatatcatgaagattgaatgccctatagacttcattgacctggacatcctcggattcattgatcataacatcaccatcaacattatccaggattcccagatcgttgacaagaaacgtctccatcttccaaaggagattgtcaatgtgatacgatgcaagaacccgagatgcatcacttccatcgaacaggagctggatcacatcttcgtgcttacggataaggaaaatgagatctatcgctgcaaatactgcgaagagaagtatgatggccggtaggcgccgcatcttttcacaagtaggcagataactttacaggccatgaaccggcagatgttattcatcctgccagaccatggcctgtttttaagtcctattttcattttttattctaaaggcaagcaagacgataagccgggttatgtcgttgagtaatcatctatctagacctttcgttgccggaaggttccagcgacctacctaagacgtgacgggccgccacatcgtctttatccggtcttgcttcggatggggtttacatgtgcccctgctgttaccagcaaggcggtagtctcttacactgcccttccacccttacctgccgggaacaaaatgtcccctgcaggcggtatatttctgttgcactggccttggagtcgcctccaccggacgttatccggcatcctgccctgtgaagcccggactttcctcacctgcggcctttcggcgcttgcagctgcgattacttgtcttacttgccttggttactatatcataattttttccaaaaaacaaatattatttacacgggagtcccttcatcctcgatcagcgcatccccgtcggcagccgtggttgccaatgtatcgcaccgctcattctggggatgcccgtcatggcctttgacccagatgaactgaacctggtggggggctttcgccttcagaagcctctgccacaggtcaatattcttcaccggctcatttttccccctcttccagcccttcttgatccatccatcaatccagtgctggttgaacgcgtccaccacatatttggaatccgagtacagttccacctggcagggccggttaagcgcctccagcccggcgatcaccgccatcaactccatgcggttgttggtggtccgcttatatccctgggacagttcccgggtatgtaattcccccttggaatccacatactccagaaccgtgccgtagcctccaggcccatccgggttgcccctcgccgccccgtccgtatatatctttacctgcatcttcctactccttcctctcttccagttcaaacacctgctgcgtcctggtgatatgcatgaccttctgccggtatccttccgattccggccgttccatcaggcgctcataagcctcgtatctcccccacatatgcatcgggaatacatgccttgtatccgtatggcgcatgaaataatccatcccccagaagaattgctcctcctggcgcagatccagaggaaggaacgccacgtcaatcttttcaccctcgatcttgcctatctcatactggtaattgcggcgcatcatctcattgtaggtctcgctttcatcttcccagtgccaccagttcagatcccccgcgtgaaatatggtcatctccttcaggcgcacaaaaaacgccacgccctcatccgtagagcgaagagtccggatcttcatcccatccagttgtatctccttacggggctccagataaatcgttctgcctttcggcccccggtccgtaatatcactggacagaatatatttgatattctcatatgcatccgaccactggaatatctttctcttaaaatgatcataatgcccatggcttgcgaatacatacacttttttctctgcaggcatatctggaagccgtcccttatagtaatcaaatatcatgaccacgtcttcatgctcgattgtaaaaccactgtgttccagatacgtaattttcatttcttatgcctctcccttgatcacgttcacagcatgtaccagttcgggaagcagatatctgaggctttcctttaccgccccggccttgcccgggagattcacgatcagcacatcctggcggattcccgctacggcccggttgagcatggaacgcttggtcagtttcatggtgtgcgcccgcattgcctccggtattcctaaaagaggtctttcaacaacgtccatggttgcctccggcgtgcagtccataggaccgcatcctgcgccccccgtggtcaggatcaagtctgtcagatgattgtcggccatcctctgcatcactgttgacagtaccttccggtctgtaggcaatgccctcatgaatacgatctcaagtcctgcctcctctacaatcttcttaattacttctccactttcattttcttccctgtctctgtatatgtctgtgtttgctgtaataattgcgaccctcatactgtacctccatacttttctctgttgttttctattagaatattaacccttttacaataataatgcaatgattacggtgcagattcctgcaactcccattgccactccgcttacggccccttctacttcccccatctcaagcgccttggacgtcccgatcgcatggctggccgttccaaatgccacgccgatggctaccggatcctttaacttcagcatcttgatgataaatggatggaggatggcgcctccggtcccgcagataatgaccgccatcatggtaatggactctatccctccaagctgggatgacacatccagcgcgatcgccgtggtcaccgactttggaagcagggaatgcattatatctgcgtgcagggccagcagcctgcataatgccaccgtgcttcccatagataggaggcttcccatcaggcagccgatcacgatgggaaaaaactgctctttgagcacttttctctggcggtagatggacagtcccagcatggctgtcacgggcaccaggaacatggagacaaactgggcgccttccatgtagtcatcataggatatatgcaggatcttgagcaccagcacgcagatcaccatggcgatcagcagcgggttggcgatcggcgtcctggccttcctagcagccacgcctccgatatagaatgccatcaccgacagcagaatgccgaacaagggattggaccatagattactcatctgcctgtcctccctttcccgccagcctcttcatgcatatctgcacgatacgcacgctggcgtaagttcccagaaatgtcatcaccagcgagatgcacaccacgatcaagaatcccgccagctggcctttcagcaaccctacatcttccaccatgccgatcgaaatcggcacgaacaccagcgccatattcgacagcaggaagtccccggtctcccggatatgctcttctttcagtatcttcgtaaacagcagaagcgccagaaccaggattgccatgacgctgcttggaaatgcgattggcagcagcgacacgatgaattccgccgcaaggcagattgctaggatgatccccagctgctttaatatttttgcactcataacttttccttctctcatttgtgtaaagactatcccggttattatagcaaaaaaaagcgtcaggttctacccctgacgccatttttacctttacttcccggacactcctgtataagtatactatatacagcttgacgtccagagtcaaatgaacctgcatccgggcctagatgatgatgcataccagcccgccgttgctgtcattgacgatcttctgcatagtatcctgcagtttttcctggctctcgtcattgatcattgccatcttattctgcatgccgtccatcaccagttcttcgatggatttgccgaaaatattcgtactccagatgccgccttcgctctccttggcatccttgatatagcggatcaggtcttctgcctgctgctcgcttcctacgataggcgctatctccgtctcgatgttggcgcggatcagatggatggacggagcttcggaatggatctttacgccgaacttgttgccctgcttgatgatggcaggctcttccagcacgatctcttccttcttggggctgactacgccgtagcccttcatgcgtaccgctgtaaatgcatcccgcacgccttcatactcttcctttaaccgggacagatcccgcatggccgcaatcaactcatactggcccgcaatatgggtacccgtcagttcgctgagcatctcgtagtagaaccggtctgccacgctgatccggaccttcacgcatccggtatccatttcgatctggtctaccttcatctcgtcaatataaggactctccggcgtctggattcccgcggccgcgtccttgatctcgctgaaccgatccataacttctttaatatgtaacagcatatcctgcttaattttatgatcccttggaagcatctccacccacttgggaataaagaactgcacttccgataccggaaattcatacagcaccgcttccatgatctgatagatatcctcttcttttaactgttcgcagtttaccggcatggcttttacgccaaagtttgcttccagttcctctgccgcctgccttgcctcgtcattaaaaggcttctttgaatttaccagtaccacgaaaggctttccgatgttctgcagttcccggatggtcttttcttccgcctccttatatccctcccgcgggatatcggtaatgctgccgtccgtggtcaccacgatgcctatggtcgcatggtcgtggatgaccttgcgggttccgatggttgccgcttttgtaaatgggatctcatagtcgaaccagggcgtcttcaccatgcgttcttcattgccttccacgtgtccggaagcgccgtctaccatatagccgacacagtcgatcagacgtacattgactgtcacatcatcagaaagcttgatctgcgccgcttcttttggcacgaatttgggctctgtggtcatgatcgtacgcccggaggcagactgtggcaattcatccttggtccgcgccttgccgttctcatcctccatatgagggagtaccagcatatccatgaaacgtttgataaatgtggacttccctgtccttaccggtcccaccactcctatgtatatctctccatttgttctggcttgtatatctttgtacaactgaaacgtattcattctaatacccccttgttatgctgataacaatgtatgctgcaatttctggttttagactaagttttttataggcgcaggctatcatttctctgaataactgtaatttgactttcccttcctattgatattacaataacagcagcacaagcaatagattcagcaacgaaaaggagagactctatgaatacagtaaaagttagaaatctggaattaggctcggggatccccgccatctgcattcccaatgtgggaaagacccgggaggagatcctgtctctggccgggcaatataaggatatgcacatggatctgatggaatggcgcatggactggtacgaagatgtggaagatacggacaaggtgctggacgtgctatcgaatcttagaagtctattaaaggacatgccgcttcttgccaccttccgtacggttaaggaaggcggagtccacggcatgtccagggaaaaatacattgcactcaacaaggcagtggctgcctcgggtcatgcagatcttattgatgtggagatattcgcaggcgacaaggatgtccgggacatgatcgcgtccattcatgcctgtggcgtcaaagtcattggctctaaccacgactttgacaaaacgccggccaaatcagacatcgtctttcggctgcgcaaaatgcaggatatggaggctgacattccaaagattgccgttatgccaaagagccgcaaggatgtcctcactttgcttgccgccacggaagagatggcttcctgttacgctgacaggcccatcatcaccatgtctatgtctgggcttggcagcatcagccgcatctcctgcgaggtattcggctcctgtctgaccttcggctccggctctaaggcatccgctcccggccagattggcgcagaggaactgtaccaggttctcaacaccgtgcatcaggcgttataagaggagtgctttactcctctttccacgcttctgccgttctttcgatggccatacggcgtatttcctcatctctcttgcggtcaatggcttccagttcttccgttgtaggtacgcccagtttcttcttctggaattccatgttggacagaatgaagttaagggcaaagcccaccaggagcgcccagcctgaacccttaaatgccagcaccgcggccatgatcccggcaatgctcttgtctgtgttggacttgcagtactccatgccgatccttgcgcagacataagcctggaacagcagcgtgatggcggatcctacgcccatgatcggcttcatgaaggatacgatcggcaccaggatcacgcttaagaaggtagccatacggaaggaactcatgcctccgatcaaggacttcatggctttctttccttccctgtaacgcattgcaaccgaaaccgtcatgccaacccacaatgggccggacaatggcggaaatggcgcaaatatggcaaggatcaggttccgaaggccgctaatcaggttggagcggctggaattaaagtcgatatactcatcatccctgctctcctgtgcttcttttaccagcgtctcgcttgttacaaagtctccgaacgccaggacatagcagatcagtgcaagcggcaatgccttaataaacatggataacggcgggaatcctacggcgaatatgctaaccgtatggaacatattcgaaaaatccggaattctaatgactgcccccatctccagaacgggcttcgccagttctcccaaggccacgccaagaagcatggcgatcaggtatgggaacaggtttccatacttagccatcacatccagaatcttatattttcctctcttcttctcgcagaagggtgagaaacttaagaatgccaaaagcagagttcctgccagcgtcgctaccggagccgtcagcagttggctgtcttctgccaactgtccctgaataacggtaatcggcgcagcgagaaggattccccccttgaccgaggtcggaacgcttcttacaaacttgtctgccaatttcgtgacacccataaacaagaatatgaatgccaccaataattgtacggcgatcatcgcctggatgcgctgcggccctttttcgaacccgctgatgaacgctaaggtaaatggcagcgtcggcgtgatccagccaggcaccacgggatctcccagccagccgtgaagcatgtataaggccacttccagaataacgcaactccatgccagttcatagggcagccccagatagtccgtcaagtatgggattgaactaagggctgtcgctcccaggatcagtccttgaaagaactccacatattcaacgcggtaatgtacgccgggtattctccattggaaaggcccaagaggaatataagggagttcatttggttttctcgctcttcttgcactcatgattgagtaccctccttaatcttctttcgtctattttttaacaaaccaagtcaataaggaactctgcctttggaaccaaaggcagagtgacgcacggattatttcaacaatgcgctctttccaaatattttcttatgctgtcctatcagatagaacatcatcaccgtcgcgataacggatgctgcaagcagcaggcccatcatcgtgtaaatggctgatgtctcgccgatagacttggtcattgcggatacgatgtatggaaggaagcagcttgcaagccccatccatgtgtagtagattccggtattcctgccctttggtcccggacacatcaactggcgtacgccaagtcctgtctgaagtgctccgccggccgcaaagaatccaagcagggcaatcgctacatagatgactcctacgttctttacaagaagcacgattgccagcgcaaccgctgtaaatatcgaatcaatcagaactacctttagcggattccatttcaacttgcccatcatgattgcccagaatactacggcaatgatggagcccaccgtatagatggatgtcatgcctgccgcctgcatttccgtcagtccgcagtttgtcatgccaaaggccttagtatactgctgcgcgccatacatgatgaacatgcacaggaatccatagaacatggtaataaagtttaccaatccattcggcttaaccagcatgctggcttttgccgcgtcgatctcggcctgggcggcgttcttcgtctcgccatccgcggtctttaccatctctttcatatcatcgtcataggcaaatggagcaatgactgccagtacgacgcatacaacggacatcacaagcggaatccatacattaatgtgccagtttccggaattggaaaaatgtacggccatcaatgggtagataatgccggatacggatacgaatgccttgattccgattaacgcagaaccggcatatcttggctcaacggcttcctgtaccgccggatacaaggatgcatcccagaatccggaagtcgccacgcctgccaggaaggcgcatacacatgctaccgtaaagtttgcagagaacagcaggcctgcaaagcacacgatatagagtatgcctccggcaaccgccattttcttacgtcctattttatcagatatctctccgccaagccacacggtcaggaattttccgaaacctgtcgccgtgatggccagagacaccgctgctgctcctgccacttcgtctgtatatccccattgggtgaagaagtttactttattctgtgacagaataatcgcctggatgccatgggtaaaatatgccatgtataccatggccatagaaagaatatacttctttgctctcatcctctcattctccttttctctatcattctcttttgaatactgctatttggcctgctctgcctggaatttgttgtattcctcaagcggcatcttcttgcctacgaacagttcgtagttcaccgctccctgctgctggagcattccttttccgccaatcgccttgcatcctgcctcttccgcctccaggatcatcttagtcttctccgggctgtatacggtatcagccacgaccagatccttgcggtataaggatttgtcaatgagggagacgtcatcgtgaggcttcattcccatcgtcgtcgcattgatgacgatatcgcagtggttcactgcttctgcaagtttttccttgtcttccatgtcatttaccgtaacaatgcattccgggcatttctcagcaagtttttctttagtaccctgggccctgtcaaagaatttgtccttgacattgaagatggctacttcttttgcgccatctaaggccagctgtacctggattgccgttgcagccccgcctgcgcctaatactaccgtctttttaccttttacgtcaaccccgttgacttccagattttttacgaatcctacgccgtctgtcacatggcccgtaatcacgccattgtcattgacgaatacgttgcaggctccgatgatctcggctgccggtgataatttgtctaccagctctgccgcaatgttcttgcaaggcatcgtaaagtttcctccgcgcatattcagcaggcggatggtttcaaatacctttggcatctgctcttctgtcacgtcaaatgccagatatgcatagtccagcccgtcatgctggaagctgaagttgtacattgcaggagatcctgaatgtccaaccggcgttccaaatagtcccattaatcctgtgtgtccggatattctcttttccatcgtcttatatttcctccttatatctgcattgccgctgcgtatgcttccttagtagcgtccagtgcccggcgcgctcttgtggcatctcccacgacatatacttcctgtcctaactcttccagctgttctgcaaatggattgtagtttctgaatcccatggataatacgacagagtcgaatcctcttacctcatgccgttctccgtccggagactcatattccacgccgtcatcatagaaacggcatacttttgcatttacaatctgctctactttatactcatcgaaatccttcatcacatatttgcggtgctcggtgatcatgtctgcgcccatcttgtcgcggaattcaatgatggatacctgatgctgctgctctcctaagaaggctgcgatctcgcatcccaccattccgccgccgactaccagaaccttttctcctgccgcttttttgccatccagaaggtcggagccgtggatgattgccggattgtcgattccctcgattggaaggatcaaagtcttagagccggtggatactacgactgcatccggtttttctgcttttacaagatccaggtctgcttcctgattcatcacgatcttaacgcctgccttctggcatcttacgatgtagcttcggatcatgttggagatgtcgccttttcccggagggtacgcagccaggcgcatgttgccgcccagtttatccgtgctctcatataaggttacgtcgtggcctctttccgcacagatgaatgccgcgcacatgccggctacgccgccgccaatgaccatgaccttcttagacttctctgccttcggatacccttctgcctcatggcccaggaatgggttggtcagacagcagataggctctcctttgtacatattggccacgcatccctgcaggcaggcgatgcatggagtcagatcctcaagcctttcttccattgccttctccggcatatgcggatctgccagtgactgacgtccgaatgccaccaggtcggcacggccttccttaaccagaagttctgcatactgaggctctgtgaatcttccaaccgtgatcaccggaatgctgactgccttcttgatctcggataccagatctgctgagaatccgccatggatcgttgtcggcgcccacatatattcgtctttgatatgtaccgcgcgggatacatgaagcgcctgaacgccgcattcttccagatatgccgcgatggccgcgctgtcatgtacatccagtcctcccaggacttcatcggcgctgttgatgcgggcgatgatcgccaccttgtctccaaccgccttcttcaccgcttccacgatcaggcgtgggaagcgcatcctgttctcgaagtttcctccaaactcatccacgcgcttgttggttcttggagacatgaaggagcttaccagatagccgtgtgccatatgaatctctacggcatccgcaccgccttccatagcgcgtcttgctgcctctgcatagccttctaccagttcatatacctgcgcggtaggcacttcttccggcgtgtctcttcctaccgtagatgggatggctgttgccgcctggattggcgcgcctgcattctttgcatttccttccggccctgcattctgcagctggatggaaactttggcgccttttgcatgacaggcatccgtaatcttcttcaggcttgcgatgctgctttcatcgtacaggcaaggctttctcgggccgcccttggctcctttatgtacaacggtcgcctcgatggtaaccaggccaaactggcctttcgcacgttctgcataatatgcgacagactgatcgctccagcatccatccgcatttgcgaagttattgcccatcggcgggactacgaaacggttctttacagtcattggtccaatctggattggcttgaacatattttcaaatttcatatcatttcctcgctctcgatttattgcttgtcacaagaattatctctttatgtatcaggtatctcttagtcttccagaatctccggccatgcttccttcaatacttttacggtattgtcataggtatgggctgcagcttctttcaggcctcttgacaggatctcgtcagagatgacctcaacgcctaccaccttaggatcgattccagcttccttgatcatctttacaaaccctgccgtatcctttgctccggttcctggcgcgagacggtcatgcatggattcgtctcttaagatcgtctttgcatatggcctctcgtaagcatcgttgatctggatggagatgactttcttagcctgctcttctgtcaggatgtcgtaggactggtctgctcttacccagtgccatgtatccaggatcagcatcgcattgtcgcatccggatgcctgaactacatcaaatccttttttgagatccgggataccgctgtatggcattggctcaactccgatcatgtactttccggccctctggcataattcttttaacttctgagccgtatactccacagaatagttttccataagtccgcagttgatatggcctactccaaagagttcgcacatatggaaacacatctgctctttgtacttctgctcgtaggaacggttctcctctgcccactgtacgatgtactctacctcggtaaccttgattccgtgcttatccaggattgctaaaatgtcttcatcatgaagcccctcattcaacgcgtccacataggtctctgccctcaggccgattccttcataaccagcttctttcgctgcgatgacccggtcctcaaatttgcactggtctcccaatgtccatgaacttactgtgattggattttttcttgacataatacgtttctccttccattgttaaaattgaacatgattcttctatttttccggttcaatcttgtgatttttactatgctttgattatattccattgttaaattaaaaacaaattgttaatattgaccgaatccatagattttgtttatagttcatgttagaatatagtcaaaatcagaaaacaagggagaaatcatcataatgaatctttaccacctcagatattttgtgacgctggcacatctggagcattataccaaggccgcagaaatattagccattacccagccaagccttagccatgccatcgcatccttggaaaaggaactgggcgtaaagttatttgaaaaagaaggacgcaacgttgtcctgaccaaatgtggccaggcttttctgactgatgtggaacgtgcgcttgatatgctggattccagcgtcaacaaactgcagatgaccggaagcggcgaaggacgtattgacatcgtccagctcagagtgcttagcagcatcatcgtccccggcttcgtaaaaggattcctggattccaagccggacaagaatatcgacttccattttcatggctccacaggcatgtctacagacatgatccagggcctgaaagaccggaaatacgacgttgccttttgttccatgctggatcatgagccgcttattgagttcgtgccgatcgcccgccaggaactggtcttggtcgtaccgaatggacatccgcttgagtccagggatcgcatagaccttaaggaaacccttgaatatcctcagatcgccttctcaaggcgcagcggcctgcggcctgtgatagacaagctgttcgacaaatgcggcggccgtccggaatatgtatattcggtggaagaagaccaagccgtggccgggcttgcgggagcaggatttggcattgccgtggtccccaatatgccggtgcttaactatatgccggtgaagattatacagattgaaaagcctacctgggagagggtcttctacatggctactctcaagaatgtctaccaggcgccggtcataaatgaattcaagaaatacgtaatggagcatgcggatctctgatccctattggaatacacttttgggcatagtaaagcacccggtacatcgaatctgtaccgggtgctttactatgccttatcctattctttccatggcagcgccgtatgttcggccttgctgtctcttagcatcagttcattgaccgcttctctcggatcctttccttcgaagaggacttcattgaccttgtcgatgattggcagggaaactccatattccttgcccagcttgactgccgcttttgtagaatataccccttctaccaccatcttgacctcgtccatggcttcctgcatagacattccctgtccaatcagatagcctgccttccggttacgactgtgcacgctggcgcaggttacgatcagatcgccaatcccggtcaggcctgtaaaactctcaattgctccgcccatcttgacacccagccttgcaatctccgcaatgcctctggtaataagcgccgccttcgtgttatctccatagcccaggccgtctgcgatgcctgccgcaagggcaatgacattcttaagcgatccgcccagttccatccccagcatatccgggctggtatacacgcggaacacctcgttcatgaacatatcctgcagatactctgccgtctccttcgtcttagcgccgatcacaacgatggtcggcagccctctgcctacctcttccgcatggctggggcccgataatacagccacgttcgcctgcgggatctcctcttcaatctgctgggacagggtcatcagagtgctttcttcaattccctttgccacatccacgataatctgcccctctgctacataaggcttcatattgcgcgccgtactgcgtgtaaatggagacggcacagccagaacaataaagtctttccccttgatggcggattccatctccgatgtaaactccatatcatctggaatctttacgccaggcagtttggactcatgctcccgttttatggaaagcatcttcacttcgtcgtcattgatggaccataccgtcacattgtgcccgttcttgtggagcagaagcgccagtgcggtaccccagctgcctgctcccataatacctacatttgccataatgtttacgttcctttcatactttgtgctatttcttgccgacacttagcttattctccgtgccggttaatagtctcttaatgttctccctgtgcttaaagaaagcagacagcatcaaaaatgccgcaatcccatacatttcgtagagataattctgcgctacatggaatcctcccatctgtccgtagatcaccacctccgcaagatagatgatgaccaccaaaagagagccaagcgacacatacctggtgatccccacaactcccacgaaagccgccaggcagatcagtaccatccacacattggtggtgcttacgatcagccctgccgtagctgcaattcccttgcctcctttgaatttcaggtagaatgggtaattgtgtcccagcacgacccccatgcccacatacatggcaagaagcggcatcatgtccgcatggctctttccatagagcagatgcaccacgaccaccgctaacacgcacttaaagcagtctcccagcagcgtcacaaggcctgccttccagcccatagtgcgcaaggcattggtggttccggcattgccgctcccctgctttctgatgtccacgtggtgcagcttgccgtacagatatcctgtctgcaataatccaaatgcgtatcctataatcacacatatgaaacgttccataactagcgctccttatcctttctttcccgtacaaagaacttcagcgaagttcctctgaatccaaatgcctcgcgaatcttattctccaaatacctggtataggagaaatgcatcaattccttgtcattaacgaatatgacgaatgtcggaggcttcacagccacctgggtaatgtagtacagtttcagccttttccctttgtctgacggcggctgctgcattgccacggcctcggccatgatctcgttgagcacgccggtagctatcctgagcgtctggttttcaattaccatgtctatcttatcatataatttgttcaagcgctgccctgtctcggcagatacatacataatctccgcataaggcatgaatgacagcacgcgacggacttcactgtcatactcccgcatggtcttgtcattcttttctatggcatcccatttatttaccacgatgatgatgcccttgccccgctcatgggcaattcccgcaatcttcgcatcctgctctgtcacgccttcggtggcatcgatcacgatcagcaccacgtctgcccgctctaccgccgttaccgtacggataatgctgtagcgttccagttcttctttaatcttgttcttcctgcgaaggccggccgtgtctatgaatacatattccttcccattgtacacgatatctgtgtcgatagcatcccgggtcgttcccgcgatatccgatacgatgacgcgctgctctcccaagagtttgttgatgatggaggattttcctacattcggcttgcctacgatcgctatccttggacgctcatcctcttcttcctccctgccatgctccgggaaatgctccgccacttgatccagcatatcgccgatccccaggcgggacgccgcagagatgggcaccggatcgccgatccccagattatagaactcatatacatccggcatgaacttgtcaaaattatctactttattaaccaccaggactaccggcttgccggagcgcctgagcatgtccgccacctttgaatccgaatctaccagtccctggcgcacgtcagtaatgaaaatgatcacgtctgccgtgtcgatggcaatctgtgcctgctcgcgcatctgggacaggatgatgtctttgctctccggctcgatcccgcctgtatcaatcagcgtgaagtccttatcaagccagttcacatccgcgtagatacggtccctggtcactccgggcgtatccttgacgatggatatcataccacctgccaatacattaaaaagggtcgattttccaacattgggtcttcccacaattgctactactggtttactcattttatatctcctctatcttactttcttcgttgaccatactccattatacattacctttcccaaatagtccaatctgttgttgacctttttataggaaaagtgatataaatattaatagtgattactataaattcgaaagatacaggagattatcatgccaaatattaagttaatggagacggcgcttcccgtagcgcccctaaagatcgcggcccttgactcatgcaaggtgatgggccagaaagtaaatgattatattgtcagattcaggcaggatacgttaaaagaatctttggattcgccgcttttttccagttatcagctggacaattacctgatcgactgccactgcccccgtttcggaaccggggaggccaaaggaattatcggagagtcgatccgcggaaaagatctgttcatcatggtcgatgtctgcaactacagcctgacctatacagtaaatggtcacttgaaccatatgtccccggacgaccactatcaagacctaaaacgcgttatctcagcggccaacggcaaggctcaccgtgtcaatgtcatcatgccgttcttgtatgagagccgccagcacaagcgtacgaagcgcgaatccctggactgcgccctggcgcttcaggaactggtcgacatgggcgtcaccaatattcttaccttcgatgcccatgacccgagagtccagaattctattccgctgcacggtttcgacaacttcaatcctccttaccagttcatgaaagcccttcttcgggcagagccggaactgatcgtcgataaggagcgcctgatggtggtaagcccggacgaaggagcaatgcaccgtgccgtttatttctccaacgttctcggcgtcaatatgggaatgttttataagcgccgtgactactctaccgtaatcaacggcaagaaccccatcgtggcccatgaattcctgggcgatgatatcaagggcaagaatgtcattatcgtggacgatatgatatcctctggggaaagtatgctggatgttgcaagacagatcaaggacagaggcgcggaccgggtattcgtctgcacttcctttggattgttcacagaaggatttgatatgtttgatgaatattatgaaaagggctacatcgaccgcgtgattaccacgaaccttacttatcttcctccggccgtacatgaaaagccttattttgtaattgcggatatgagcaaatatatcgcgctgattatcgattcattcaaccacgatatttccatcggcgctgtcctcaatccgacagacaagattcacaaattattggaaaagcaccgcaattccttgtaattaatttaacaaactttgcagtctcatatcttttataatgcagataaaaaggatgtctcatccacttagacgagacatccttttatgttcctctcaatactttcttaattagcgctgctccatatatgtggttaaagcggtttcttcggtaaagtattccttgagtgctgcgaataaacctttcatcaaaactcacttccttcatactgaattcgtatatcttattccgttaaaagattaacacctagcactccatttgtaaagatattattttaacaaagatcttctaatttttctatacttttttgtgtattttttaacattctttttctattccgaaaggactagaaatctgtatagctaactccgtccttcagttcgactcctttggctctcgccatctcggagacggttaccagctggtatccctcatctatcagtttcggtatcagtgcaagggctgcgtccacgctctccgtatggatatcgtgcatcaggatgatatccccgtcttttacgcttcccatgacggaatcgatcgtggcctgcgcatttctggtcttccagtccagcgtatcgatattccacaggatcatcggcattcccacggttcctttcatcgtagaactgatagccccgtaaggcggacgcatcagggtggctccctgccctacgatattctggagattgccattggtccctcctatttcattctgtatgccggatgcatccagtttcgacagatctgcgtggtcataggaatgattgcccagttcgcagcccacctccctcatcttctggatcacatttggataggatggcactttctttcccagcatgaagaatgtggcatgggcattgtacttcgccagtgcctccaccagttcgccggtgcgcgggccagggccatcgtcaaaggtcagggctaccatcggcttgttcgggtctatggcgctctccttcttggagataagcacgccgttctcatcaaatacgcacagcgtaagccccagccacacctctcccgccgccatcttgccatcctgttcaaagtaataggaggaaccgtcgatatcctgccagccgatataagccttgccgtccgcacccaggtaatactttccatcatcgctgtcaagccatccggtcttcatcattccatctttgtcaaagtaatatctggaaccgttgatatcctgccagccggacgccttcttgccgtctccgtcaaagtaataggtgttcccttttgagactacgaagtcatcagtgacataggatccatcatagcgcttaaacttgtccccatcccactctccgactttattcttaactgtcaggacgccatcggcagtatcaattctgaccagcccgatccagtccttttccaggaatcctctgaccgcatcctccagcgtcagggttaccggataatctccttccacagtcgtatccgcttcgcagccgatggcatagcgcttcccatgttccagatcttttgccaggtcgcttactgtatagccggtttttgcatccagcacggccttcgtcttccccttggtctctaccgtgatcccgaacttgggaaggtcttccccctgcaatatagaatcgctctttaccgcaaggaatatctccgcctcctgctgggatgccgccgcagtccgaaaaagaaggaatggaagagcgcaaactacaaaaagagcaaaaatccgcaaagggactcttactcttcttgcttttttatgtatatgcttcttgtgctcgctaattctttcatttgtcatccgtatgtctcccctacacatcatcaaacatccatctatgtagttgagtataacgtaattcgacacgtttcgcaatgaatcttatatgaacaattcttaataaatgttaaatttattacccgttattcaattacgcgcacgcgcagtacttcgccgaccttcctcagatcatccaccactttctcaggaaccgggctgtcgatgtctatcatcgtgtaggcatagccgcccttgctcttattgctcatgtctgcgatattcatattgtcatccgccaagatcttcgtaaactgtccgatcatgttcggcacattgtgatgcagaaggacgatcctggtattcttgcccctcaatcccatatcgctgtccggataattcacggagttctggatattgccatgctccaagtaggccctgatctgctttgccgccattctggcgcagttatcttcggactcttccgtcgaagcgcccagatgcgggattacaatggctccctttacccctgcgatgacaggcgtcggaaagtctgtcacataatgctttacctgtccggctaccagcgcgtcaaccatagcctcttcgtccaccagcaggtctcttgcgaaattcaggactaccacgcctttcttcatcaggcttatggcatctctgtcgatcattcctatcgtgctctcaagcgcgggcacatggatggtgatgaagtcgcactctttatacagttcatccacggtttttgcatgaatgatattccgggacagtctccacgcggaatcaatggatacatacgggtcatagccatagacatccattcccaggtgcatggccgcattggccaccagcacgccgatggcgccaaggccgatgacccccagtttcttgccttccagttcgtagcctgcaaatgctttcttggccttctccgtctcttttacgatgttgccgtcttcttcgttttcctgcacccagttgatgccgccgatgatgtccctggaagccagcagcattcctgcgatcaccagttccttcacgccattggcgttggctcccggcgtattgaataccacgattccttgttccgcgcatttttcaaggggaatattattcacccccgcgcctgcccttccgatcgcctttaattcaggaccaaactccatctcatgcatgttcgcgcttcttacaaggatggcatccgcgctctttggaccgccagccggcgcataatcttccgtaaactgtttcatacccacttcggatatttgatttaagcaataatatttatacataactatgcattctcctcttcaaacttcttcataaatgccaccagtgcctctacgccttccatcggcatcgcattgtaaatgctggccctcatgccgcccaccgagcggtgtcctttcaggctctcgaatccggccgccttggcttcctttacaaacttcgcatccagctcgctgcttcctgtaacgaaaggcacgttcatgatcgaacggtcctttggctccacagtgcctttaaacagcctgctctgatccagatagtcatacaggatcttcgcctttgtttcattgcgctctttcattgccgcaaggccgccctgccttttcagccatttgaataccttgccgcagatatagattccatacgccggcggcgtattgtaaagagacttggcatctgcatgggtcttatactggagcatggtaggcgtccccggaagcacatcctcggtaatcagatcctctcggatgatcacgatcacggttccggcgggaccgatgttcttctgcacgcctccgcatatcaggccatatcgggtcacatccataggctctgacaggaaacaggatgatacatcggcaaccagggtctttcccttggtattcggaagttccttgtatttggtgccatagatggtattattctcacatatgtacacatagtctgcatcttctgaaatgggaaggtcagagcaatccgggatataggagaatgtcttatcctctgaggatgccacgatattgacctttccgtatttttttgcttcggcggctgccttcttggcccactgtccggtaacgatgtagtctgccaccttgttcttcatcaggttcataggaaccatggcgaactgctgggactcccctccttgcaggaataataccttatagttgtcaggtatgcccatcaattcccgaagatccgcctctgctgtatcaataatttcctggaacgactgcgagcggtgactcatttccataacggacattccggtcccgttgtaatctagcatttcttctgctgcctcttttaatacttcctccggtaatactgccggtcctgctgaaaaattgtacactctgctcattgttgttcctccatttcccttgttctgttatttctgttttttcaggtccttttcatcgaatgcttcgttgatcggagcgcctggggctaccatgggccatactttgtcatcgctgtccacctggcagtcaatgacgaccggcctgttaagagtcagggccttttcgaatgcttctttgaattcttcctgggtggttgcacggattccttttgcccccatagcctccgcaagcttcacgaagtccacggcgtcattcagaaccgtcgccgagtaacgctttccgtagaacagatcctgccactggcgcaccattccaagcacgtggttgttaatgactacctggatgattggaatactgtggcgcacggcggtggcgatctcgttcatattcatacgaaaacatccgtcacctgctatattgacaactgtccgatccggcagtcccgtcttggcaccgatggaggctcccaggccgtatcccatggttcccaggccgccggacgtcagtaatgtccttggctttgtaaatttatagaactgggctgcccacatctgatgctggccgacttcggtcacgatgacggcatcccccttggtctgtctgtagatttcctcaaccacatatgggccggtcagtacgtccggatgataggataatggatatctcttcttgtaatccatgatcttctctacccattccgcatgatcttgctgctccagcctctcgttgaggatacccagcacggtcttgatatcgcccactacgccgtcggtgatcagtacattcttgttcatctccgcagcatcgatatcaaactgcaggatcttggcgttcttggcaaactttctggcattccctgtcacgcggtcgctgaatctggctccgatgacgatcagcaggtcgcactcgctgacgccatagttagccgtcttcgtgccgtgcattcccagcatgcctgtatataacggatcggtgcccggaaatgcgcctttgcccatgagggaatccgtaaccggggcatccaccttcttggcaaatgtatagagttcttcgctggcgcctgagagtaccgcgcctcctcctacaaagatatatggcttttttgcttttgttatgatttttaatgccgtctgaatatcgtcttcgaagatgtctctggaaggctcgacaggcttgatagactctttcttatattctgccttgttcgccgtcacatccttggggatatcgatcagcaccgggccgggacggtctttcttcgcgatcacgaaagcctttcttatggtctccgccagatcttttacatccttgacgataaagttatgcttcgtgatcggtatcgtgatacctgcaatatcaatctcctggaagctgtcttttccaagaagcgacacgcctacattacaggtaatcgctacgatcggaatagaatccatgtaagccgtcgcgattcccgtaaccagattcgtcgctcccgggccgctggtggcgaagcagacgcctacctttcccgttgccctggcatatccgtcagcggcatgggcggctccctgctcatgggaggtcagaatatgggtgatctcatcgctatgtttatataattcatcataaacattcaaaatagccccgccaggatagccaaacacggtatccacgccctgctctttcaaacattcaattactatctctgatcctgttaattgcataccttttgttctcctattctatcttaattcttcggtatttccaggatagctcctctgtttcctgaagttaccatggaggcgtatcttgccagatatcctgtggttaccttcggctttctaggctgccatgcctgctttctcttcgccatctcttcctcggatatatccagttccaacttcaggtttgggatatcaatcttaatcatgtctccttcttccaccagtccgatcgggcctcccactgccgcttccggcgatacatggccgatggatgcgcctctggaggctccgctgaagcgtccgtccgtgatcagcgccacgctggatccaagtcccatgcctgcgatggcagaagtgggattcagcatctccggcatgcccggaccgcctttcgggcccacatagcggataactaccacgtctcccgccacgatcttgccgcctttgatcgcttcgattgcggcctcttcgcagtcaaatactcttgccgggccaacatgcaccagcatctcttctacgaccgcagagcgttttaccacgctgccatccggcgccagattgcctttgagtaccgcaagtcctcccgtctggctgtatggattgtcaatgggtcggatcacctgcggatccttattcaccgcgtctttgatgttctcacccaccgtcttgccggtaaccgtcaggcagtcggtatggagaagccctttcttattcagttccgccatcaccgcatatacgccgccggcttcatccaggtcttctatgtaggtaggccctgccggtgccaggtggcagaggttcggggtcttttcgctgattccattcgcaaagtcaatctcaaaatccatgccaatctcatgggcgattgccggaagatgcagcatgctgttggtagagcagcccagggccatatccaccgtcagcgcgttgaggatggcatcctctgtcataatgtctcttgggcggatattcttctcccacagttccatgaccttcatgcctgcctgcttcgcaagtcggatccttgcagagtagactgccggaatggttccgttgccgccaagtcccatgccaagtacttccgtcagacagttcatactgttggctgtgtacatgccggaacaggatccgcaggtaggacaggtcttattctcgaattccagaagatcatcgtccgtgatcagacccgccgcgttggctccaactgcctcaaacatgctggaaaggctggtcttctttcccttgacatggcctgccagcatagggccgccgcttacgaatatggtaggtacattgattctggctgccgccatcaaaagtcccggcacattcttgtcacagttgggcaccatgaccagagcgtcgaactggtgggccagagccatggcttccgtggaatccgcaatcaggtctctggttaccagagaatatttcatgccgatatgtcccatggcgatcccgtcgcatacggcgatggccggaaatacgatcggcgttcctcctgccatggcaaccccctgcttcactgcatttacaatcttatccaggttcatatgacccggcacgatctcattataagaactgacaattccaaccagcggccgctccatctcctccggcgtcaggcccagggcgttcaacaatgaacggtggggcgcctgctgctttccctttgtaactgtatcgcttttcatcctactacctcctgaatctttctctatctgtctatatcttatgctatccttgcttcctcttgtctttgtacctgttatatacgctccgcgatcaggcttcccatttccgcggttcctacctgggtcttgccctctgacatgatatcaatggtacggcagccttcttttaagactttgttaactgcctcctcgatcgcatctgcttcctggtccagatcgaaactgaaccgcagcatcattgccgcggacagaatagtggcgattggattggcaatgcccttgccggcaatgtccggggctgagccgccacttggctcatagagtccgaacttggtctcattcaggctcgcgcttgccagcatcccaatggagccggtgaccatgctggcttcatccgacaggatatcgccgaacatattctccgtcagtaccacgtcaaactgcttcggatccttcaccagctgcattgcgcaattatctaccagcatgtgttccagcgcaacctccggataatccttagccacttcttccacgacctttctccagagcctggaggaatccagcacgtttgctttatctacgcttgtcaccttcctgccgcgcttcatggcaatatcgaacgcccgctttgcgatccggcgaatctcattctcattatatgtaagggagtcaaaggcagtcaggacgccgtcgatctcttctgtcctgcgctctccgaaatacagcccgccggtcagttcccgcataatcatcaggtcaaatccgccctcggtaatctcttcctttagcgggcatgcgtccttcagttcatcatacaggatggctggccttaagttggcgaaaaggttcagttccttacgaatctttaaaagtcctgcctccggccttttggacggttccagccgataccagggtgaagtctttgcatctcctccgatggagcccatcagcactgcgtcgcatgcttttgcctgcttcaccgtctcgtcagtcagcggaatcccatgtacgtctatggaggccccgcccagcaaaagctgggtatacttgcaggcgtggccgtatttctctgcagttttatccagaaccttcattgcttccgtcacaatctccggcccgattccatccccttttatcactccaatattcaggttcatattcattttccttcctctgttaaaaaaatctatagaacatataatatcctattttaatggttgtttcaagactttaatcaactaaatcgtcatctgtctgtttttttaggttcccggggccaaatccgagaggcagcaattctgccagcatatgcgcctgataatcgccttcgtccttcgccaaaataatcgtgaattcgccgggatcacagaattccatcatgacctggcggcacacgccgcagggcgggcagtagtcatgattcccctgcgcatcctcgttcacgatgcagatggcggcaaagtctttctccccctcgcttaccgccttgaagatcgcagtccgctccgcgcagtttcccgggcttaacgccgcattttcgatattgcagccagtatagatcttcccgctcttggtaaggagggctgctgccaccttgaatttagaataaggagcataggcatattccagtactccaaatgcccggcggatcagttcctctctcatgctttcctgtaacttcattccctaagtccctctttctttgcaatcttgacaatccggctggtccccaggcgggaggctccaagccttaggaatttctcggcatccgcaatggaactgatcccccccgccgccttaatctgaacgccttctcctacatggcgcgcaaacaatctcacgtcctcaaacgtcgcgcctccgcttccaaatcccgtagaggtcttgataaagtccacaccagcctcggtcacgacctcgcacatccgtatcttctcctcttccttaaggaagcaggcctcgataattaccttcaatatccggctgccggccgcctctttgacggatcggatctcctgcgtgatccggccatactcccggtccttgacccaccccatattgatgaccatatccacctcgtccgcgccgtcctttaccgcctctgcggtctcaaatactttggcagccgtggtattgtatccattgggaaagccgatgaccgtgcacactgtcatgcgttcctttacatatgcttttgcctgcttaacataagatgggggaatgcataccgatgcggtcccataggcgatggcgtcgtcgcacagcgtcttgatctcttcccacgtagccgtctgtgacagcaatgtatgatccacatgtcttaatatctcctgtatctccatatcatccaacactccttttccttgtactgttataattccagcgcgatctccatcatctgtctgaatcctgactgccgttcgctggcgcttatgctctcctgccggaacagatggtttgagatggtcagcatgcataacgccttcttccctgcccgagccgcgttcatatagagggccgccgcttccatctccacagccatcacgcccattttcctccatttcgcatttacttcatcgtcatcattgtaaaaaatatcagaggacaggatatttcccaccttcacgttgactccttggacccttgcggtattcaccgccttctcaagcagcctgtaatctgcgatcggcgcaaatgtgccgggcagctggtactgtgcggcataattggaatccgtgcaggctcccatgccgatcaccacgtccttcaactggatatcgtcccttaacgcgccggcagagccaatccgtatgattgcctccacctcatacctatgataaagttcatacgtatagattccgatggacggcatccccatgccgccccccataactgagatttcccggcctttataagttcctgtatatcccagcatgttccgcaccgtattaaagcacctggcatcttccagataagtatctgcgatgtatttcgcccgaagcgggtctcccggcatcagtaccgtgctggctatctctcctttttctgctgcattatgtggtgttcccatatatctttcctccttaatcctgcttcttatcttctctgatcagcgtcttaagcgcctcgatcgccgtgcggataggtgcctccacgtcatgtgccactggattggggaggttcttcttcgcccgctcctgattggccatcaccaaaagcaccgtgccgaccctgactctcaaacagctgcccacgatatatagggcggccgactccatctctgatgccaggcatccgcatttgacccaggcatcccatttattcttcaactcatagcccactggcttggtttccggcgaatgctgcccatagaaagcgtctttgcactgcaccacgcctacgtggtaatcctgcccctgcttctttgctgcctggatcaaggcattggtcacctggatgtccgcaactgccggatattcgatgggggcatactctttgctcgttccctccatccggattgccccggaggcgatcaccacgtccccactctttacatccagagccattccgccgctagtgcctacccggataaatgtatccgctccgactcttgcaagttcttccatggcgatggacgcggacggccctccgatgccggtggaagttgcgcttaccttttccccttccagatagccggtataggtcacatattccctgctgtcagctatgagcctgggttcctcaaagtgttccgcgatctttgcgcagcgtttcggatctcccggtaggatcacgtatcttcccacttctccttgcgctacctggatatgatactgcctgtccttatcttcagagtaattaatcataggcttttcactctctttctatgttcttatttatgcagacttgctgcctatatcataccattatgccgctgattccaccagtcattcatcaaaactggtagtttttcctcccagtttcgcttataatagatagtagatacgaatggaactttggaagcgatcatatccggcaagaatcaggaggtgcctgcatggcttttacaatgaatattcaactgatctattttctgcgtcttttgggggcagccctttgcggcgccatgatcggctatgagcgggaaagccatatgaagatggccggcatccgtactcatgctatcgtggctctggcctcctccttaatgatgctcatatccaaatatggattctacgacatactctttatggagcatatcgggcttgacccctcccgtattgctgccggagtggttactgccgtcggctttctgggggccggcgtcatcttcacccgccacatgaatgtaatgggcatcaccactgctgccggaatctgggcaacggtaggcatcggcatggcgttcggcgcaggcatgtatatcttaagcgccgcttccaccctgctcatcctcctgtttcaacttctgttccatacccgattcctccaccccagaagttcatccatcgagcagatcaccatcctggtagacggatccgaggacatcaaggtcctattaactgacatctttgccactaagaagataaaaatctccaatattactgccaagcgtgtggacgcagcaacattggagatccggctgtatgtacgcttccctgaagcctacgatatctatgatatatttcaattactaaaggagtatccgcagatcaagtccatcgacatctgaccttactgctccttcaggatcttggcggtgatcccggcacataccggaatcacaagaatacagcctatggcgctgatcacgatgcaggcaaagtcctggaggaatgccttggcattcagcatggacaccaaggaataatggtactgcctcaagtacaatatcagcatcagcgcctcccctatataggcaaaatacagcgtattcagcgtggtcgccatcacatccttgcccatggcaattccagactcaaacagttctttcgtccccagatcagggttgttgtcatacacctcatagatggaggaggaaatggcaaccgccgaatccatcaccgctcccagtagcccgatgataatcatggatatgcataccatccgcatatccacatggatattaaaggaatagtacagactcagatcactcttcatatcaatctcattcaatccgccaatgtgcatcttccccccaatccagaaaacgaataccagaagtgccagcatgaccgcccctacggataaaagtgcggagatggacttcttcccggttccgttctgatagaggatggtgatgcagttgactgccacgcttcctgccaccgtcacgaggattggatggatccgggctgccatcgccaccacggccgccagaaataccagcatatttccaaccagggttatcagagataccgcgcctctgtctccccctacaatcaacagaaggaggaagaatacagccgccagaatatagatcatgtctttttcctccctatcttcagtattatggaggacaatgcgatgctgactgggattgccagcacgattccgatgcctccgatcagaaatctgctgatttcaaaaggtatctgcaggcgaacgatcgtcagcaggcttacctcattcttcatcttcatgatcataagcggaatcagcccgcagatataggtaaaaagcagtacattgatcatggtccccatgatgtcatgcccgatctctcttcctgagcgggccagactctttacagagatcccgggatcctttaagatcagttcattcaaagcagccgcaatggacaccgccacatccattactgctccgagtccggcaatagccacgcttgcgataaagatggattccagatcttgtcctcccgccacatagtcaagagccgcatagtctatctctcctccatattccatagccagaagaaaaatttccatcgtcagggcggccgtcgcaagcgcggatagaatcgccaccagcgaccggcagttcactccatttaccaggaacaaggtcagcaccgtgaatgccacgatcatggccacgcagatccccataaggtcatcccccgcctcatagcgggccagcccatagagaaagatgacaatattcatgccaatggagcacaaggagagaatcccccttcctttgccaaggatgatgacaagataggccaagatgactgccagtagaacggcgtactggtctcttttcacccctttgatgctggcagaagatatcttgtcttctcccgagagacttaggaacaccttgtctcccctcctgtatgcttccttatccatgcctgtatagtcgtattctcccgccaccgtaactcgctttcctttatgcctgccattgagtatcttcaccgtcatcttctggcggtagacaggttccgagtcattctcagacagggaattataattggtagccgttcccgactgctgcgtgtcaaccttcacgatctttcccacgggcgtatcatagagcccttcgttatggaacgcaaatatagccgctgcggccagcgccgccagaagccacagctgccaccagaaacgcctgtagaaccttcgtatgcgctcccggtaaggcatcttcttctttaatctcataatcatccaccaacttctttctagtcgcaattgatattataccattctcccgcgaaatgcaagcctcgcaaagaaacggggacgtcccggccacgatcctctagatcatgggggacgtccccatcttcaaatgtttatagagctttattttaatatcttaagattataccgatccttctttcctaactcctgccgattgcctcccgtcttctgcaattcttccagacgcatcttctttctgcggatcccctctcctgcttctccctgcggacggtagcctgcgaattcctcctcatatgtggtcctgcgtccattctttagataatcggctccataactcatatggatatccaatttcaggtatgcacataaaaaggagttccaagccctgtgaagcagattattcttagcatccgcccggccgcctatatacaagataagcagcgctccgatcaagattacgcatgtgacaattacaaatattcgaattgtttcaggcataccaacaacccctttctcatctgtgtaggtaaatatcctcttgttatctttatattagccttttcagtttatttagtcaatctatttatatgattttaataaaatttctgatttcaattcagtctcataaatttcctgttattgcacatcctaactatgaggtgatagcaaatgatagacaatgaagagcttcccattggctttaccatgtctctggcccagcattccgacattctcagccgttttgcctctctttcgaaacaggagcaggaaagaatcgtggatggagcccgccaggtcaaaagccgggaagaaatgaacagttacgtggaaaatatgtttcagggatagagtttactgctctgtccctgatttttctttttgctcgttccgatagcggattgcctccgggtcctttatctggcggacgcgggtccattccttcgtttcatcatcgcgctgtacttccgagcggttctgggaaagaaatctggtcaattcgtagcagctgacccatatctcgttatttccttccctttgggattcgtcaaaaatcaactgcaggccaaaatgcagatgatactcatcgatgttattcgtattctcttccgtgctgtagccggttctgccaatatatccgatgacatcccctgcctgcaccaccgctccttcttttaaaccttctgcataagggcggttctgccttaagtgggcgtagtaataatagcgcctgccgtcaaaactgtttataccgatgcgccagccaccatactggttccatccaaacgctgatacatagccggattccacggcgatcacaggcgttcctacctgccccatcatatcatgccccagatgatttctcttatatccataacttctggacacgccaaagtcatcataatccgaatagggaaattccttcgcaatcgggctgtaggccttcagtccataaaccttcttcttcggatgtacgtactggaattcccccaccatcccgtcaaggaccgcgccgtatgcttcccggtagtagggataatactccatatccttcgtcatttcctcaaccgtctggcttccatccagcagtttttcggcgatatccgccagatcttcctcctggtacctggtgaagtctccaccgtacttggtgcctagaattgccagaagatccacccaatgaagatgcggatcctttccataactatccagatcatactggtacgccttcttcattgcctcgcaagttacgttgaattccacccattttatgtaatccttctcttcttcctgtgcccgctcctttccagaagtgcccggatcctttactttttcttcagaactctcctgacggacagaccttacctggctctccgtatcggcatcccccctattccagcttagaatgcctcctcctgccagcataaggcataaaaggaaaacttccagcatggccccctgcttctcgtttatatgcatcttcctatctcccccgtaacctgcactattcttatcataacaaaactatgccatgacaagcccggctatgaacgtaaatgccatacacgcggcaatgccggccaccgttgggaccagaatggaaaggagcatccacttaaggcttcccgtctctttgcgtatggtaaggcaggtggtagcacagggccagtgcatcagtgaaaacagcatggtgctgattgccgtgacccaggtccatccattctgggatagcagcgtccacatggcctggctgtctcccagttccagcaggctgccctgagccagatagcacatgaccacaatgggcattacaatctcattggctggcatccccaggataaaggccagcagtatgatgccgtccagccccatcagccgggcaaatggatccaggaagtcggcgcagcgggccagcaccgtggcgtctcccaccttaaagttcgccatcagccagatgacaagccctgccggggctgccaccgcgatcgcccttcccagcacgaagactgtcctgtcaagcacggaacgcacgatcaccttgccaatctgcggcctgcggtatggcggcaattccagggtgaatgacgaaggaagcccttttaggatggttcccgacaggattcgggatactagcagcgtcatcagaattcccagcacaatgacgcctgccagcagcaaagccgataaaaaagaggaaaatatgcccgccgcatttccaatcagaaacatggatataatggacaagagcatgggaaatctgccattgcaagggacaaagttattggtgataatggcgatcagccgttccctgggagaatctataatacggcatcccgtcactcccacagcgttacagccaaatcccatgcacatagtcagcgcctgcttgccgcaggcatggcatctttggaagcaatggtccagattaaacgcaacccttggaaggtaccccagatcctccagcagcgtaaataacggaaagaatattgccatcggaggcagcataacggataccacccaggcggcaacccggtatacgccatagatcagcggctcatatatcatcttcgggacgccggccgcccgcaccgccagtaccagtttatcttccccccagaacagcccatccgagagcagctgggacgggtagttggccccgcagatggtaatccagaacaccagaagaagcataaggaacatgatcgggaatccggtcttcttgctggtaaagatccagtccagcctccgatccttgcggtcataatccttcttcccgtactgtaccgtcttcctgctgatctgttctgccctgcggatataggacgcggcgatggcatcgctgatcttctccttcgaatatccggcttgggccaggtattctaccgcctccttcagtgctcctgcaacctccgcatcctccaccagggaataacctagatattcctccatggaatccagaagattgctgttcgcatccagcaggcgggcacagaaccatctggtattctcttctccttttgtcgcccactctaccgctggctccagcatgccgattgcccgttccacgggtccttcatatacaaaggccaagagcttatgactcttctgcttttccatctgctgcagcgttagaaagatgcgttccaagccgatttcttcccttgcggtgattccgatcacaggcacgcccaattcttttgaaagccccttgatatctatatgaatctgcttttttgccgcctcatccatcagattcacgcatacgatcacctgctcagccgcttcgataatctgaagcaccagattcaggttccgctccaggcaggtggcatcacagacggcaatgactacatctggatgtgcaaaacatatgtaatcccgcgcaatctcctcttcctcggaatgtgccataagcgaatagcatcccggaagatctaccagttcatactgccttccattatagtcgcaagtgcctcgggcattactcaccgtctttcccggccagtttcccgtgtgctgcttcagcccggtcagcgcgttaaacaccgtgctctttcccacattaggattccccgccagtgcaagaaccttacccattctgacaccaccgcccctcttccatatgcaggtaacgaatcatatgatcaccgccttatttcacaaaaagccccagcagtcctgcttgggccatagccttataatagtatatgaaagttacgtctgtcctgtgcggtccatgcagatattcttgataaatgtcttctttttatcattagaaaggccagtgcccctatgcgaccagcctgatcctcacctggctggcatcctccttgcgaagcgcaattaccgtcctgcgaatcaaatatgcgcatggatctccaagagggctgatacccacgcattctaccagagttccttctatcagccccatgtcctgcagacgtctgcgcatatccgtattcatgcagatgtctgtcacaacagccctatcccccgggcttaaatccgccatatgcctgcaatacttcatgccgtcacttcctgtattcgtaaaaggctctgcgataagcgagcctttagccttattctactatatgcaaaaaggaggtttggggttcgaaattatagttatatatctgccatcactctcatacgattatctgaatcgactattcgggagaattgccatgctcatctataccgttaagccaggagataccgtggacagcattgctgccgcctatggcattcctgtttctacaattgtctatctgaaccagattccctatccataccggcttgccataggcgaagccctgctgcttccaacgcctgcgggtatctcttctccccgctcttcaatctatgcaggcggatatgcctatccctttatcagcccgtgggttcttcgggagacgctcccttatctctcctatctctatatattttcctatggatttacaatggaaggggagctgatcgggcctttgctggatgacgcctggatgattgataccgccagagcctttggtacagcgccaattcttaccttgacgccttttgggccggacggacgttttaacaattccttgatttcccaggttgtgaatgacctggatgccagaaggcggcttaaagatgcgattgtggagcagatcacgacccgaggattccaggggctggacatcgacttcgaatatatcctcgccaatgacagggatgcctttgtagatttcgtcgcctatatgcaagaagccgtaagcgccctcgggtatccaaccagcgtcgctctggcaccgaagacctcggatacccagaccgggcttctctatgagggcaaagactaccggaggctgggcgagactgcggattatgtccttttaatgacttacgagtggggctacacctacgggccccccatggcagtcgccccacttaataaggtccgggaggtggtggaatatgcggtcaccgtgatccccccttccaagatccatctggggatacccaactatggttatgactggacgctgcccttcgtgcgaggcacctcccgcgcccgcaccatcggcaatgtggaagccgtgcagctggccatttcccgaggcgcggccatccaatttgacgatatcgcccagtctcctttcttccgctactggtccaacggaacagaacacgaagtgtggttcgaagatgtccgcagcttgaataggaaatttgaccttgtcgaagagttcggcctaagaggcgtatcctactggcagataatgcaactatttcgagccaactggctccttctggctgaccggttcaatttgacacaccagttgtgacgattttacgcaccagttgaggcaagttgacacgtaacaaaatgaagatgtgcacgtaacacttttgaaaagtgttacgtgcacatcttcattttgttacgtgttcaatatacgcttggcgttctccacgcgttctgttgtggggggctccaccccttccaggggatactcaagccccagttctttccatttatatacgcccagcgtatggtagggaagaacttctactttttctacattcttcagggtcgcgataaagtcatgaagtcttatgagatatgcatcttcatcgcttcttcccggaaccaggacgtggcgaatccagactggctttcctatatctgagagatatcctgccagttccaggatattctggtttgattgtccggtcagaatcttatgctgtccgtcatcgatatgcttgatatccagcagcaccagatcggtgtactccatcagttttcggaattttccaaagaacggctctttttttgtaaatggatttccgctggtatcaagggcagtatggataccttcctgcctggccctttcgaatagttctaataagaagtcgatctgtaagaggggctcgcctccgctgactgtgatcccgcctttgcttccccagtaagagcggtactttagcgccttttctattagttcatccgcagtataaggggttcctgctctcttattccaggtgtccgggttgtgacagaactggcagcgcatggcgcagccggaggtaaatatcacgtagcggacgcctggtccatctacagagccaaaactttccaaagaatgaatgtatccttttgtcatactcttgctccttcttacattctatcgtgacaggttctggcgataacgtccatctgctgttccctggtcaggtcaatgaacttaaccgcatatccggacacgcgaatcgtgaaattggcgtattccggcttttctgggtgctccatagcatcaattagtttctcggtgccaaacacgtttacattcagatgatgcgctccttggctgaaatatccgtccagcacgcctaccagattgtccgtgcgctcctcatcgctgtgcccaagcgcgcccgggctgatggtctgcgtattagagattccgtcaagggcaagttcataaggaagcttcgccacagagttcagagacgccagcagcccgttcttctccgcgccgtatgatgggttcgccccaggcgccagtggctctcctgcttttcttccatccggcagcgatccggtagccttgccatatactacgttggacgtaatggtaaggattgaggttgtgggttcagaattccggtaggtatggcatttcttaagtttatgcatgaatgtcttgagaagccagattgcgatctcgtccgcacggtcgtcatcattcccgtatcttgggaagtctccctgcgtctcaaagtccaccgccaggccgtcctcgtctcgaatcaccttgaccttggcatacttgatcgcgctcaaggaatcgaccacatgagagaatccggcgatcccggtggcgaatgtacgtcttacatccgtgtcgataagcgccatctccgctgcctcatagttgtacttgtcatgcatatagtgaatcatattcagggtgtccacatacagttttgacagccattccatcatagcgtcatatcgttccataacttcatcgtaatccagatactctgaggtgatcggcctgtacgccggcgctacctgctctctcgactttacatcgataccgccattgatggcatacagcaggcatttcgccagattggcgcgggcgccgaagaactgcatctccttgcctgtctgggtggctgacacgcagcagcagatagaatagtcgtccccccataccgggcgcatgacatcatcattttcatactggatggaacttgtggtcacggatatcatggccgcatacttcttgaagttctccggcaggcgcggggaatagagcaccgtcaggttcggctccggcgatggacccatgttttccagggtatgaaggaatcggtaatcgttcttcgtcaccatagagcgtccatcctgtccgagtcctcccacctccagggtcgcccagaccggatctccggagaagagttcattatatgacgggattcttgcaaacttcaccatccgaaacttcataaccatgtggtcaatcaattcctgagcctgcgtctcagtaagcgttcccttttccaagtctctctgcatatagatatccaggaatgtggaaatgcgtcctacgctcatagctgccccgttctgggtcttgatggctgcaagatagccgaagtagagccattgcaccgcttctttcgcgtccttggccggctgcgagatgtcatagccatacacccaagccatctctttcatttcttttaatgccttgatctggtctgcgatctcttcccgcaggcggaagtccgtacccttcatgccgtgcctctcgccgcggataaagtcctgctgcttacgctcgatcaagtagtcgatgccatagagcgccacgcgccgataatcccctacgatgcgtcccctgccatacgtatccggcaggcctgtaataatcttgttgtgacgcgcccttttcatctccggcgtatagatatcaaatacgccctgattgtgcgtcttatggtatttggtaaatatctcgtgaagtctctcgcttggctggtagccataggtggtgcaggccttctccgccatatggataccgccgtagggcataaaagcgcgcttcagcggcttgtccgtctgaaggcccaccacttgttccagatccttcatatcttcctcaatatatccagggccataagccgtaagcccggatacgatctctgtctccatatccagtactccgcctttagcacgctcttctttctgaagttcctgcaatctgccccatagtctgtcggttgcttctgtagcgcctgccaggaatgacgcgtcgccttcatacggaacgtagttgttctggataaagtctcttacatcaacgtcatctttccatagccttcccttaaaaccttcccactgttcatactgtgccattctaatttatcccctttcgtgtatcaggttttcattttcccgcacagtatatcacccggaaataaaaatatcaagccttattctgataattgttctcattactaatcatgtatgcaattttgtgcaatatgctttaggcttatagcatttattgatagtccaaatactgtttgccccagttacacatttcgaccagtataggcgaaagggtattgccaaaatccgtaagcgaatactccgtttttggcggtacgacaggatatacctttcgatttataagtccatccttttctaattcacgaagctgttgggccagcattttatcagtcgccttaggcattaacttgtgaatctcgctataacgcaatgtcttccccatcaaatgccacaggatgaccgatttatacttgccgccaatcagctggattgtcgcttcgacaggacaagtaaattcacaacacttggtattcatcaaatcaccatactttctttttgggtagtatataacttaatagtgcgttcttgtcatataatctattgcaggtataattatagtataggttaacctgatacacaacgacaaatcaaggaggattttttatgaattttttggatattgcaaaaacacgcttttctgtaagaaaatatacagacaagaaagtagaggcagaaaaacttgatcaaattttaaacgctgcacatgtagcgcctaccgccgctaatctacagcccgtgcgcttgctggtcatacaacaagaagaagggttaaaaaagatttccaaggctgctaatctacatggggcgcctttagcgatccttgtctgcgccgaccattccaaggcatggaaacgtccttttgacggcaaaaaaaccacggatattgatgcttctattttgacagaccatatgatgctagaagctacggaacttggcctgggttctgtatggatatgtttcttcaagccagacattataaaagaagaatttcagctgccggattctcttgagccgatcaatatcctggctatcggctatgcggatgaagcgccggcagacccagaacgccatttggcaacgcgtatcccattgggccaattggtatcctatgaaaaacttgattaaaccatttataaaagcacaggggcagcgcgatttaagacgaatcacgctgcccatattcctattatttcaaattatttcagatgccagatatctttattgtattccgctatcgtccggtcggaggagaagtaccctgccatcgcgatgttggtcagcatcttcttgctccacgccttgcgatccgcatactcttcgtatgcgcggttcttggtggcaatatagtctttcaggtccagaagtgtcatgaaccagtccttctggatcagttccgcatgaatctgaagcagatggtaaggatcgccgatcttcatcatctctgggctgataatgaagttgatcagggagcggatctgctcgtcattaatatagtaatccaccgcccggtagtcccggttcgcataatggtcaatgacctgctggctggactcgccgaagatatagatgttgtcatcccccaccagttcgtggatctccacgttggccccatcttccgtgccaagcgtcaccgccccgttcagcatgaacttcatgttgcccgttccggatgcttccttggaggccagggatatctgctcggagatatcgcaggcaggtatcagatgttcagccatggttacattataattttccaccatgactaccttgaggtatggcgccacatccggatcatgatctaccagttcctgcaggcacaggatcagatggatgatatcctttgcgatggtgtatgccggcgcggcctttgccccgaagatcatggtaatcggtatctgcggcttctttccggcctttatttccatatatttatagatcacatacagggcattcatctgctgccgcttgtactcatgcaggcgcttgatctggatgtcgaagatagaatccgggttcagttccagcctctgcgtctcttttaaatattccgccagctgcactttcttctggtgcttcacatccaggagtttctctaatgcgatctcgctgtcgatgtggcgcagcagtttctccaacttgttggcatcctttcggaagtcttcctccacatacccgctgatccagcgcaccagttccttattgcagtgcagaagccaccggcggaaggtaatgccgttcgtcttgttattgaacttctgcgggtagatatcatagaaatgcttcaattcggaattcttcagtatctccgtatgaagagccgccactccattgacgctgtgcccgaagtggatgtccatatgtgccatgtggacgcggttctgttcatctataatggcaacccttggatcctggtatcttcccttgacgcgcgtatccagatccttgataatcggcacgatctgcggcgctacctgctctaagtaatccagcggccatttctccagcgcttctgccaggatcgtatggttcgtatacgcgcaggtcttctgcacgatctcgatggcttcattaaagtcgatctgattctgcaccagcagacggatcagttccgggatcaccatggacgggtgggtgtcattgatctggatcgccacatgctcatgcagccggcgaaggtcatatcccttttctttgcattcctttaagatcagctgggccgcgttggataccataaagtactgctggtagatccgaagaaggttgcctgccttgtcgctgtcatccgggtacagaaagagcgtcaggttcttgccgatattgtgcttgtcaaagttgatcccgtccccgataatgctctcgtccacgccttccacatcaaaaaggtgcagtttgttcttcccattctcatagcccgcaacatcaatgtcatacagcctggaagtcagcgtaaaatcacggaacggcacttcaaatctaattcccgtatccgtaagccagctctcgggctctatccatggattcggcacttccttctgcttgtgcccctgaaatacctggcggaacaggcccatatggtagttcaggccgattccgtcgccggcaaggcccaaagttgcgatggaatccaggaagcaggcggcaagccttccaagtccgccgtttccaagggacggctccggctccacttcttcaatccgggaaagctccctgccatttttcttcaggacttctgccacctcttcatagatgccaagattaatcaggttattagacagaagcttcccaatcaggaattctgcggaaatatagtataatttcttatcgccctcaatcgccggcgtctctttcagtctttctttcgtataggcaagcaggacataatacaattccttatcgcttgcatctttcatctctttatttaattttgtctgcaccaaggccgtcaattcattttctaacataatcttcctccttttgccatttcttctacactctaacacaaatccagttttttttccactatccctttaccgctcccgcggcaacacctttaatgatatgcttctggctaagcagatagaagacaatgatcggaagaatggccagtaccagcatcgccatcatagcgcccatatcaacggagccatacccgcccctcagatattggaccgcgatggggatcgtcttatagtcgctgccgatgaccagataaggaagcaggtagtcgttccagatccacatggcattcaagattgcgatggtgatcaccgtcggcttcaatatcggaagcacgatcctgaaaaatgtctgaagaggcgcgcagccatcaatcatcgccgcctcttctatctccagcgggatggacttgatgaatccgcagaacatgaagactgaaaggccacagccaaaccccaggtacagaaatatgattcccaccggattatccagatacagcatgttggcgatcttcgtcatcgtaaacatcaccatctggaagggcacgatcatcgcgaagacgaacagataatagagcgccgtggtaaatcgattcttaaccctcacgatataccaggcggtcatcgaagtacacaggatgatgagggctaccgaaaacaccgtgatgaataaggaatacccgaatgcggacaaaaatccggtcttttctatccctcccgcgtaattctcaagccctgcaaacagatcgccaatcggcagggcaaaggggtcattactgatatacagcttgcttttaaatgaattctgcagcaccaccagaatgggcagcaggaaaatcaccgccagaactccgattcccacggtcagcgtcacgcctgctctccgggacagttcgcttacgtcctcctctttctttgcttttttccttcccatcagttctccacctccctgcgtctggtaaaataaagctgcagcagcgcgatcgccgcgaccatcacgaagaataccacggccttggcctgccctacgccttcccagccggttctaccataaaaggtattgtagatatcaagcgccagcatctgcgtctgcctccccggcagtccggccgtcagcgcaagattctggtcaaacagcttgaaggagttggtaagcgtaaggaacaggcagatggtgatggagggcatgaccagcgggatcgtaatctttcccaatatctgaagattcgtagccccgtctatctttgccgcttccatcagttctgtggaaatgttctgaatgccagcgatatagatgatcatcatatatccgatcatctgccagcccatgaggatcaccagcccccagaagccgtactttgcgctggtggttatggtaaccccggatcgcagaagcaccgcgttgatgatcagctgccagatatatcccagcacgatgccgccgatcaggttgggcataaagaatacggttcggtaaagattggttcctttgattccttttgtaagcgcaagcgccagaagaaaagcgcctgcattgatcaggatgactgaaacaactgtaaatcttgccgtaaaggacaacgctgacaggaagtcctggtttgagaacatcttcgtataattgctgatgcctgtgaatcttgcatcgatcacggttgtaaagttacagaacgacagatagattcccattacgaacggaatcaggaacgcgaccgcaaatgccagcagggtcggaagcacgaaaataggaaaatatctctttaaggtcttctgcataacttgctccttccctattcaccgtccgatgaattggctttttccgcagcccagtcctttttcatatcagataccactgctttccattccttgcttccctgggcgtattccaacaaggacgcgccgaaattatctttgaaggtctggcttggaaatgaggtaaagttccaggatatggtttcaagtccattgtcattcatatatctgactacttcttttgccagcggatcgtccggctgctcatcctcgctgaacgtcttaaatggggagatgaatccaagtttgaccatttccttcttgcccttctcctcattggtcagccaattcaggaattcaatggcagccagcctcttggcttcatccaccttgctgttgacgcaccagaagttctctgtgccgatgcacaggccctgttttgcatcctcatccattcctgtatagattggaaggaattttacatcctcttcctttacgacattgcctttaacgtcagagacttgtccccatccccagttgccgttctggaccatggctgatttgccaagggcgaattccgccatggagtcttccaccgtcttggagcccacaagtccaggttccgtacaagagttattcaggtacaggtcgaagatattctgaaagttcttgttgtaggtaaagtcaatcttctctttgtctgtcaccccgctttcctgatactcatagtagatcggaacgttggcaagatgggtctgccatctccaatcctcccctgcagcaaaagaagtggatgagaatacgccttcaatgcccagttcgtccttatgcctggtcatatcttccactactgctttcaaggtttcaaaatctttaatctcttcggccgaaccgatctctaccgccttttgtggcagcgcaaaatatttctccatgatcgcatcgttatagatgattccatacccctctaccacgtaagggattccatagacgcccttgccgtccacgccccggattgccatatccttatccgtcagattgttatagacttccgtatctgccagatccaggcagtaatccttccagttgtgatagccgatgggcccgtttatctggaacagagtcggcggattcttcttggcaacctcggacttaagcgtggattcataagtgccagaggccgctgtcaccacctttacctctaccccggtctctttcttatactttttcgcgatctcttcccactgctttgccacctccggcttaaaattcaggtaatagatggatgcttttccttcctccttctttccgcacccagtcatagccatgccggcaaccatagataatgccaatcctgcagccaggattctctttaatttcataacagttctcccttccttgaaatatttggaatacatattgtaagtattcctgttttcaaggaaaatattactttataaaatcaattcaatcccaaatccgctgtcagacgtaggcacctcgtcgatcttcacctgaattgccagtttttccgcatacttctttacaaagtaaagtcccatgcctgtagaattccggaagtctgccctatgcccggtgaatcccttatcgaagataaagggaagatcttcataaggcacgccatttccgttgtccctgactttcagatgtgccttgccttcttccttagcatccatccagccatccacgcttacccggccggattcctggtctgcatacttgagtgcattgctcaagatctgtgcaagcatgaaggctagcacgttccggtcgcttatcacttctatggacgcaatatcagtctttacgtcaattccccgttcctttgcgatgggaaggaaatcatccagactctctctgacgcaagtttccagatccagcctctcaaacttataatccacatggtccgcttgaagccttgcatagtacaggattctgtccacattgccgctgatggcatgatggacatgagccatccggtcatagacatagggagacatctcttccctgtggttatcaagcaccagcgtagccagagatagcggcgttttgacttcatgagtccatgcctcgatatactcctggtaaacctgcatttcttgcgcctgacaattcctagccgcttcttccagttcttcgcggcatgcctgcagcgcatccatctgcctttcctgtcgcttcttccctatgatgcacccggacgcgatgaccagcacggcaaagatggcagccatcacagcgacgcttccgaaggcatccggcgctgtcagccacagtacgaaggtaaaaaagccttcgcttgcagccaccagaatgatccacggcagttcctgcctgatcttccatctattctccctcatatctttccacctccagccgatagccctgggcgcgcaccgtgcggatcgcctcccgcaagccgatgtggtccatgctctttcgaagccttgccatattcacctgcagaatgttgtcatctacaaattcgctgccgccccacagcctttcgaataattcttcttttggaaccgtctgcggataatattccatcagcgtcttaagaatctttccttctgtctccgtcagatccgtatgcctgtccttaaaggccgccctgcctgcgtccaaatccaggatcaggctccctgcctgcaaggaatcgtgcactcttccataggtctttatcaggcgggccacacgggctgttagccgatcaggatggcacggcttcgtaagaaagtcgtctgccccaagtcccaacgcatgcagttcatctgccagggcatcccgggccgtcaaaatcagaataggaaatgccgcccttgccttcagccgcctgcaaagctcgaatcctgaccttccaggcaggttgagatccagcaccgccagatccggggcgtacgcaaggatttccttttccgcctcatcaaaggaagagatactccacgccgagtatcccttcctttcaaatgtcgttaccaattcttctcttagatatctgtcatcttccactactataatcctgctcacaaggcattcctcccgtccgttgcccgaagcgtccgtatctcccggtggctggcgcttatgacaacatggatatagatccattcaaacacaagaaacagtagaaatgcaacccctgccatcaaaaaaactttggaagcagccgtccccgccggcagcctcataaaactgccaaacatggaccacactgcaaaaatggagttgacggccgccacgccgatggccagcaggaaaaagatgccaatctggcgccccgcgcacttgcacagttctttcgtccctgcccccagcataagcagcgtccggtaccgctgcctgcaggcatgctgctgcatcagatacttaaggccgataaccgtattggagatcagcaggaacaggacgccaagatagatggacagataactggatgccactgtatagaacaggttcctgccaatcccgctgagatagctttcatattccagtccggtaaaggaaagtctttcatccaccttctggattgcctgcataagccctagttcatctacagcctcctggctcaccgttatattccagcagaagggcgcctgcccgtctttggtccaagccagatacttctcatccggaacgataaaggctatatagagcgtaatttccctgtccgctaccacattatcgctgtaaagttctgtaagcagcctgtaatcctgcccgtcgatgctcacttcgggcctgctctttaacgtgtgttccagaaggtctgtaaatgcccggtcatccttcatggatgtatatagcccgatcccatccgttcccagttctataggatcttttcctatggaggcgcgcaactggttataactggcctcggaaatgacatattccagtccataccccagatgatcctgaaggctgcttttctgcgtactatctggctgcttcaggatcgcttcctgcaggccttttaaggaatatgcatgcgcatctatatccatatgtccgagatacatcggataataccccgctatcatggacggatcgtcaagccttcggatgccttcctgaatctcagcctctgtccccttgaccgagaagtccgccgtccttgtctcgcccgagcctcttcctgccgccatgccaatgccaaaggagatgcacgcaagcgccagcaaaagcaacagcgaggctacagccaatgccttatactgatctaccacgctttcctggatctgtctgccagtaaaggtataaaggccgggctggctgggcccctttctttgtatgcgctctccaatcaaggatccaatgccttgaaacaccaggaaagttccgcttcctccaagcagaaagatcagcgcgatcactggcaggccaaagccacgaagaagcaggatccctgccccgtaagccatcaaaagaagaaggagcccaagaatcaggctggctttcctcctcttttcacccgccgctgcctgccgttctggcccgactgcctgcatcagctccattggctcttttcggctgtactgggcgcataagaccagcattgcaaagcactgcacaaggatgaatcctgccacggaccacagcacggcgggtaaggacagggatatcttatgcccgacgataccaagcccgattaccttggctgttgccaggctgattccttctgtaagaagcaaggctatcggaagcccggccaggacagagaccaggctgttccacagcgtttcgcccataagcatggcaaatagcctgccgcggcccattcccagcatcaggtacaggccgaattctttccttcgcccatccatctggtagcggtacgcgaagtagaccaggaagaatacgaagaacaaagatactgcatacacgacaggaatcagcagcagcagcctctctatcgcatcactttccaacgtcttgaggaagcgaatgacatcctggctctcaagtgagagcaaagtatagaaggctacgatcgcagccgccaggcttccaaaaaacaggctgttattcttccgattctttgcggcacttcgccgaatctgcctaaagaacatttgcgcttcctcctcccagctgtgccatgactgccacgatcctctcatagaaagattcgcgatcctctttgcggggattccttctgagttcatggaacaggcagccatcctgtatgaacagaatcctggtacagtagcttgccgcatgggcatcatgggtcaccatcatgatcgtcttcttctgctcctggttgatgatcgccatcttatccagcagtatcttcgagttgcggctgtccagggctccggtaggctcatccgccagcaggatctccggctgggtgatcagtgctctggcggccgccacacgctgcttctgtcccccggacatctgggaagggaaccggtccagcaccggaacaatatccaaccggcccgccagttccataagtctcccctgcgcctgcttttgcgtgattccatgaagcgccagcggcagcacaatattctctctcgccgtcaggttatccagaagttcaaattcctgatacagatacccgatctttcctcccctgtattttgcaagcctggctcccttgaaggcagagatatccgcgccgtttagcagtatttcacctgacgttggtctggtcatggcggctatgcagttcagaagcgtggtcttcccggaaccgctgtctcccatgattccaagaaactctccctccagcacatcaaaactgatgccccgaagcgctgccgtcctgctctcgcccttcccgtaattcttggtgacattcttaacctgaagtatcttgatccaatccatcgtctctcccccttgcctttctttgcctttattatagcaaatgatagtgccgaatcatacttacagacgatgtaaggtttcaagaaaaaagagagacgtccaaaaaacgcctctctgtcaggattctcttctattatgcagaccttactcggcagaagccttctctacctgagcgatcgctgctttctgcatcggaatacggcaattccggttgcttccgaattctacgataacatcgtcatcgctgatatcgattataactccataaaaaccgctggtcgtaagaacggtatctcctacttccatctcagaaatcatggactgaactctcttctgttccttcttctgtggccttataaagataaaccagaaaccgccaaagattactgcatatactacaaacagtaatgcccaacttcctcctgaactctgtgctgctaatgtgtacatactaattcctcctaaatctcattaaacactattgctatcatacacaataatgctgcattcatcaagtcattttgtataattcatgtaaattttacatttattccctgccggacataagcccatcaagcttctcttttttatactcctgataccgtccttcttcaattgcctggcggatctcttccatcatagaattgtagaaatacaggttatgcagcacgcatagcctcattcccagcatctcttttgctttcagcagatggcggatataggctcttgaatatgtgcggcaggcaggacatctgcatccttcttcgatcgggcgctcatccagttcgtatctggcattgtaaaggtttaacttcccgtgcctggtatacacgtgtccgtgcctgccgtttctgctgggatatacgcagtcaaagaagtctaccccccgatccacagcctccagaatattggctggcgttcccacgcccatcagataagtaggcgcattctgcggaagatgcggcacgacagcgtccagaatccggtacatatcctcatgcgactcgccgacagcaagccctccaatggcgtacccgtccagatgaagatctgcgatctccttggcatggcggatacggatatcttcatagatgcctccctgattgattccaaagagcatctgctcctgattgatcgtatccggcaggctgttcagacgctccatctctttcttgcagcgtatcagccaccgagtcgtccggtccaccgacttctcaatatagtccttctcggctatgcttgacggacattcatcgaaagccatggcgatggtagaggccagattcgactgaatctgcatgctctcttccgggcccatgaagatcttcctgccatcaatgtgggagttgaaatacactccctcttccttgattcttcgaagtcctgccagagaaaaaacctggaacccgccggaatccgtcaggatcggcttgtcccagaccatgaacttgtgaaggcctcccaacttctttatcacttcatctcccggacggacatgcagatgataagtgttggaaagttccacctgtgtcttgatttcctgtaaatccgtggtcgagacggctccctttatggcagccgctgttcccacattcataaatacaggggtctcaatgaccccatgtactgtatgcaatcttcctcttttggcaagaccatccttctttaataattcatacatgatcttatcctcatttttctatattcttcgtcgtctagtaatggcacaccaccggcgttcccgctgtgatcaggttataaagctgggctgccacgtcataaggcaggtttacgcatccgtgagagccattggtctgatacctggatccgccgaaggatgactgccatgtagcgtcatggaagccgattcctccgttgaatggcatccagaacttcaccggcgtctcatactcataggttccatccggcttcttggttcctctcagaacctgatccagcgccttatatgccagggaatagactccctgcggcgttccgtttcctttgttcggattcccggtcacgattcctgactgtagtaccacctggccgttctgaacgaaatacatcatctggttagacaggtccacctccgcgtaggtgctgcccacgtcatttccttcgtggcttgcagcgcggctcgcataattgggctctctggtaacggtctccgcattctggatattagcaatcagcgcattgtactctgcctcctgatcaatcttccatccataacttccgcctgccacatttaccgtattgccggttgccgtcgtaaatgtcctgggcttgcccttggtatcgtacttatccgccagggactggataaaggctcttaccgcttcttcattaaaagtcacgttcatatctgcatccacagttacccattgggatatgacggaagcgtccaccacttccgtagccggattaaagtcatatgtaacgtttgctcccagatatctgttcatggcatctgtagccgctacgacttcctgtgaatcagatacaaaccttggcaatatatagcatcctgtcttgaacaggtccaaagtcggcttgaatccattgatggccttggtcacggcctcattaaacttctccgtatcaatctgggtgcctaccacttctggaaccactacaaacttgtcgttctggaattccggatgggcatccacggaaacagtctggttctccggcttcaggcattccaggccttccgttatctttgcaagggcatccttgtcatattccacgccaatctctgatgtaatcttcggatgattccacagggaagtgatccaaaggaaattattctgcttcttagccagtttctcaagttgttcgcccggaacatacataagagagatatcagagccgctgatcttctcgcttccgccatcagattctttaagcgttaagacataatccgccacctgctgcttcatataggcctccacctggcttacgcttttcagagagaagtccgtcccattgatcttcgtaaagaacatgaaatggctgctaaagaatatggcaaatcccacatagatcaggaccaggactccgataatgatgcctgccacgatcgccgccgtcttcttgcgtttctttttctttgccgccttcactatatcggtctcttccatatcgtcatcttccaattcatcatattctaattcttcgtcttttatatcgtcatactcttccagactatcttcatcgtctatctcatcgaatctgtctgtctcaagaacaccgtcatcagcagatatgtcagcgctatcatcatcttccatatcaatttcttcttcctgggaatcttcataatcatcatccgtttctttaaaagcatcagaactattgaggtcatcatagatttctttcatggtctcttcaataatctcatctgctctttttcctgtatcacccatagatattactcctctttcaaaatctcacacgctaacattataatatgcatatatgcaaaagtacaggaaaaatcacaaaaaaataatgaagatttcctgaatattttataattgcaggcttgccccctttctaatataataagaatatctattatatatgaaggagacttacttatggctggatcaacttatggaaccttatttacaatgactacctggggggaatcccacgggccggcaatcggcgtcgtcgtcgacggatgtccggcagggattcctctctcagaaggcgatatccagagattccttgaccgaaggaagcccggacagagcaaatataccactgcccgcagcgaatcagatcaggtggagatcctctccggcgtgttcgaagggcgcaccaccggtactcccatctcgctcatggtgcgcaaccaggatcagcgttccagggactacggaaagatcaaggactgctaccgtccgggacatgccgactatacctttgattccaaatacggattccgcgactatcgcggcggaggacgcacctccggcagggagaccatcgggcgggttgccgccggagccatcgcttccaagatgctggatcagcttgggatccatctaagagcctacaccaaggcgatcggcagcatcgtggttcccgaatctgcctatgattatgattgcattgtccataatagtctatacatgcccagcgacgattatgcacaaagggcttccgcttacctggaacaatgcatcaaagagcaggattcttccggcggaatcgtggaatgccgcatcaacggcatgcctgccggtatcggcgatcctgtcttccagaagctggatgcctgccttgccagggcattgatgtccattggcgcagtaaagggcatcgagatcggcgacggctttgaggccgccgcctctaagggaagcataaacaacgacgccttcttaaactgccagggcaatatctgcaagaagaccaatcattctggcggaaccttgggcggcttaagcgatggcagccccatcatcttaagggcagccatcaagcctacgccttccatctcaaagcctcagcagacggtgacccgggaaggcgaagagaccaccatcactatcaccggcaggcacgaccccgtcatcgttccaagagccgtggtggtggtggaatccatggccgcgatcactatagcggatcttctgatgaccggcatgtccagcaacatggagaaccttctgaaaatctatcaaaaatagtcccagtccgggcacgcagttcctcctgcgcccggactttaactttttcccagaaatctcttgattttttataaatatatagtataatgagccttgcacacgagttaagaaatactaaactctatgtttatttttactgtcacgcagcaaaaaggaggtacttatggaaataggcccgaaattaagagaactgcgaattgccaagaatcttacccaggaagaactggcggaccgggcggaactgtccaaaggattcatctcccagctggagcgggaccttacttctccttccattgctaccctggtagacattctgcaatgcctggggactaccatcaatgaattcttcagcgaagacccggaagagcaggtcgtcttccactatgaagattattttgaaaaggaagatacggaacttttgaataagaccgagtggatcatccccaacgcccagaagaatatgatggagcctatccgcctcactctcaagccaggcggttccacctaccgggatgtcccccatgaaggggaagagttcggatatgtgctaaaaggtaccgttaagatccatatcgggaaaaaagtctacactgccaaaaaaggggaatctttttacttcaccccacattccgagcattatatagaggctccaaacagcactggcgccaccatcatctgggtcagcacgccgcccagtttctaaagataagaataaatgatacgggaggactatcatgtcacacaaattaatcgatattgtaaatatttcaaaatcctttggagaaaacctggtcctggatgacctgaacctgtatatccgagaaaatgaatttctgaccctgcttgggcccagcggctgtggaaagaccacccttcttcggattctgggcggctttgagtccccggataccggaaaggtcatctttgacggaaagaatattacggaactggcccccaacaagcggcagctcaataccgtattccagaaatatgccctctttaccaatatgaccattgcccagaatatcgcatttggcctgaagatcaagggcaaatcccagtcctacattaatgacaagattcgttatgccctgaaactggtgaatctggagggatttgaagacaggactcccgactcattaagcggcggccagcagcagcgtatcgccatcgcacgggccatcgttaatgagcctaaggttcttcttcttgacgagccgctgggcgcgctggacttaaagctgcgtcaggatatgcagtatgaattgatccgtctcaagaacgagcttggcatcaccttcgtatatgttacccatgaccaggaggaagccctcaccatgtccgataccatcgtagtcatgaatcagggctacatccagcagatcggaacgccggaggacatttacaatgagccgcagaatgctttcgttgccgactttatcggcgagagcaacattcttcctgccaccatggtagaagaccggctggttaagatcctgggcgtcaatttcccttgcgtggatgaaggctttggacgcaacaagccggtggacgccgttataaggccggaggatattgatctggtgaagccggaagaaggcatcatggaaggcgtagtcacccatctgatcttcaagggcgtgcattatgagatggaagtactggccaataactacgaatggctggtacacagcaccgatatgttcccggtaggaacagaggtaggaatcaaggtagatcctttcgatatacagattatgaagaaacctgagtctgaagatgcggaggcggttacaattgaggaataagacaagaaaattcaagcggctgctggccggaccttatctcttctggtcagtatcctttatcatcatccctctccttatgatcttttactatgggctgaccgataaggacggggcttttacattattgaatattgcaaagattacgacgccagagaacctgaaagccctggggcttgccctcctgctttcctttgtaagcaccgtgatctgtctgctcctggcttatcctctggcgatgatcctgtccaatctgggcgttaaccagtccagttttatcgtgctgatcttcatcctgcccatgtggatgaatttccttctgcgcaccctggcatggcagaatcttctggagaagaacggggtcatcaatgtgatcctagatttcctgaaccttcctgccctggagatcatcaatacgccttatgccattgtcctgggcatggtctataacttcctgcccttcatggtccttccgatctataacgtgctggccaagatcgacaaggatgtcatagcggccgcgagggacttaggcgccaataatgtgcagacatttctgcgcatcatcctgcccttaagcgtgcctgggatcatcagcggaattaccatggtattcgtgcccgcgctgaccactttcgtcatctccgatttgcttggcggaagcaagatcctgctgatcggcaatgtcatcgagcaggaattcaagcagggaagcaactggcatgtgggaagcggcctgtccctggtacttatgatttttattatcatcagtatggcattgattgccaaatacgataaagatggggagggaactgtattttgatcaagaaaatcttacagcgtttttacctggtgctcatcttcgtgcttctgtacgctcctatcgtaaccttgatggtgctgtctttcaataaatcgaagacacgctccaaatggggaggatttaccaccaaatggtacgtagagttattcaagaacgagcagattatgaatgccttgtatacgaccctgatcatagctcttctgtccgccctgatcgcgacgatcataggaacggcggcggcaatcgggatccaggccatgcaccggaaattccgcaccaccatgatgggggttaccaacattcccatgctgaatgcggatattgtgaccggcatctccctgatgctgctcttcatcgcatttcggttttcgctgggattctcgaccatactgctggctcacattacctttaatattccttatgtgatattaagcgtcatgcccaagctaaagcagaccaatgtaagcacttacgaggcggccctggacctgggggcttctccggtctatgccttcttcaaggtggtattcccggatatccttccaggcgtatcatccggattcctgttggcctttaccatgtcgctggatgactttatcatcacgcattttaccaagggccctggagtggacaccctgtccaccaagatatacagcgaagttcgaaaaggcatcaagccggaaatgtacgcgctctccaccatactcttcctgtccgtgctcctgctgctcattctggtcaacatcgcgccggatgaaaagccggataagcacaaggccgttaccgcaagaagcataaggcgccataaggccggccgcttccttcttcgcaaggtcgttcctgtcatgatggcattggtggtaatcgtgggcggcttcttctatggctccaaggcagccacaggaggcgataatcaagtgattgtctacaattggggagaatatatggacccggagactatcaccatgttcgagaaagagacggggatcgaggtcgtctatgaggaatacgagaccaacgagatcatgtatcccaagatccagtccggcgccattgcttatgacgtggtctgcccttccgactacatgatacagagaatgatagaaaatgacctgctggcagagattgattttgacaacatcccaaatatcaggaatatcggcgatacttatatggatcagtccaggcagttcgacccggagaacaagtactccgtgccatactgctggggaacggtaggtatcctctataacaagaccatggtggatgagcctatcgacagctggtccgtactgtgggatgagaaatacaaggataatatcctgatgcaggacagcgtgcgcgacgcgtttggagtcacgctgaaatatctcggctactcgcttaattccaccgacctggatgaactggaggcggccaagaagttgctgatcaagcagaagcctcttgtgcaggcctacgttatcgaccaggtgcgagacaaaatgattggcaatgaggccgccattggcgtcatctactccggtgaagccatctacacccagtgggagaatcccaatctggaatacgtgataccaaaagaaggttccaatgtgtggattgattcctgggtcattccaaagaacgccaagcacaaggaaaatgccgagaaattcattaacttcatctgccgcccggatatcgcgaagatgaactttgactacatcacctactctacgccgaatgaggccggaaggcagctgattgaagaccctgctcttcgaaacagccccatagccttcccggatccggaagaactggcgaactgtgagaccttcaaattcctgggagatgaaaacgacgccctctacaacgaactgtggcgggaagtcaagtcaaaataagcataatgacgcataaaaatggggatgccttacgcatccccattccttatacattgaagcagccaccgccgatgaactcccgcagcagggaattggtaggaacattctcgcttccgattcccacaaaataatccaggaacttcagaagcctcttggcttccagatattccgggcagtcccggtcaatcccaaagagcagcgattctacgtaaggcttcaataccgccagttcatagataagcgctgaattgaacatgacgtccgcctcttcctgataagggaagatgttgcgctcctctcctcttctgacagacggccacatgctgatcgtccgcttagcggaagatccccgggtgcgggcatccctgacgattcttcgtatcaggcggccatccgtggtgggaatccggttgtgctcgtctatgttcaactgtgtcagggcgctgatgtatatcttgaacttgttctcatccggcaggctctccgtcagtttgggattcaggcaatggatgccttctatcaccagcacgtcattttctcccagtttcttaacgccgctcccatattccttatgtccggtcacaaaattaaaccttggtatcaccacttcttttcctgccagcagttccttaagctgccggttaaacagttctacgtctactgcctccaggcattcaaagtcatattccccgttcttatccctcggatttacttcccgttccacaaaataattgtccaccgcgatcgggtggggaatcagcccgttagcccgaagctgaatggacagcctgtgggagaacgtcgtctttcccgaagacgacgggcctgcaatcaatatgaactttctttctctgcgttcggcaatctgcgccgcgatctccgcgatcttcttctcctgcagcgcctcctgaaccagtaccacctgtaatccgtcgccgttggtaatcttgccattcagcgcgccaaccgtctctatgccctgcatatcgccccactgggtggattccttgagcacatggaacaacttattctgaggctcgaatggaggcacctctcttgggttcttctgggtaggcatctgcaccacgaacccttcatcatacagatagagtttgaaatacctaagatatccggcgctaggcaccatatagccataataataatcctcaaactcattcatgctatatatgttgaccttggataccctccggtattcaaataatcgctccttgtcatgcatcccgtgctgtccgaataaggcgatggcatcgtccgtatggatgctccgcttattaatgggcatatccatctccaccatctcgcgcattctcgcctccacatgctccaggaattcctgatccagacgaatattcccctcaatcgtacagtagtagcccttgctgacagaataatggattcggaccttatcgatatcatcgtggtttgccacatcatagaccgcttttaccagcatcaggctcatgcttcttttgtaggtcttatgcccgatcggcccggacgtagtctcaaaccgcatgacgcagtctccttccagcgtcttatgcagttcctgcagccggtcgttgataaataccagcacgatatcatcctcatagtccttctggtgctctgcggcaatctggcggtatgtagttccagcctcgtactgccggatttcatcccctatctgcacgctgtacattttcttctccatcttataaccgcctcttttctttgatttctttcctgctacatgattgtaaatggatgtacgatcggagccgccatcacctccacatccgtcagatgactgcccagatactgcctcatatcttccataaaaatatgctcgatgccatagtgacctgcgtcaatgactgccagcccctgggccaccgcgtcaatcccttcatgatggccgatatctcctgtgataaggacatccgccttcttatcaagcgccgcctttatcatgctattgccagacccgggggagatggcgatcctgcgcactctggcatcaagatctccaaatatcttgacggcgttcagttggaaggatttcttcacctcatggccgcattcctgcaaagttaccgggtgatccagatctgccactctcccgatcccctcctcgccgttatccgaaggtccattctcgcaggtggcttccaggacctctgccttagaaagattcatcttctctcctgacagccgggccattcccagcacgtcgtagttcgtatgcattgcatagtaagagatgtcgctttggatcagtttcagtatcctgtttcctataaaatccagattattgattctttttaatgcgccgaatatcatagggtgatgggtcaccagcatgtcggcctggctttcgatcgccgcgtcaataacttcatccgtcgcgtccagggcaatatagatccgccttacttccttatcatctcttcccaccagcaggcctacattatcccaatccagcgcatactctcttggataagccgcttcgatcacatccattacatccttacacagcatatgcattctcccttcttcctgtgccttatctgtcaaaatactccagagcctcccgaatcatcacgatctcctcgcgtacctcttccatacgcctggcagcgctttcgctgccttttcgcctgctcagctggccaaagatactttccctgatgcccatctcccggtccaggtactttttaagcaccggatgcttttcttccagcaggcatttgccatacaggtattcgcactccgtataaggcgcgctgcttccatgctccactttcattatagggtagaacttgccatcctcttccaccatatcctcagccacgatcttcatctggttctctgccacataacgacggactctatgtatctctgactggggctgcaggatacaggacttaagcgtatccaccacaggctttccctctcttagtatcttgataaccaggccgcctcccatcccggcggcaatcatcgtgtccacttctccgggcttcacttccttaagcccgtcagacagccgggtctcgatctgccctttcagcccgtggcccacaatatgcattctggccctctccagaggccctttattgatatccagggcaatcgcccttgcggctatctgattctcgatcagatagatgggaatatagccgtgatccgttccaatatctgcaacagaggcgccctctgtcacaagacttgcaactttggtaagtctttttgatagttccataggcgcctctttcttaatccagataatctctcaattttctactccggctggggtgtctgagcttgcgcagcgccttcgcctcaatctggcggatacgctcgcgggttacgtcgaattcctttccaacctcttccagggtacgggcgcgcccgtcattcattccgaaccgcagccgcaataccttctgctctctttccgtcaatgtgtccagaacctcatccagctgctcctttaacagcgtctgtgcagccgcttcagctggcactggcacattgtcgtcctgtatgaagtctcccagatgactgtcttcttcctcgccgatgggcgtctccaaagataccggctcctgggaaatcttcagaatctcccggaccctctcaaccggcatgtccagctgcgccgcaatctcttccggcgtaggctcgcgacctaattcctgcaataattgtctggacacgcggatcagcttgttgatcgtctccaccatgtggaccggaatccggatcgtccttgcctggtctgcaattgctcttgtgattgcctggcgaatccaccatgtggcatatgtgctgaacttaaatcccttatgatagtcaaacttttcaaccgccttgatcaggcccagattgccttcctgaatcagatccagaaacagcatgccgcgccctacataacgcttcgcaatgctgacaaccagacgcagattggcctctgccagacgctttttggcctcttcatcaccgtcagccatccgtttcgcaagatccacttcttcttctgcggtcagaagcggaaccttcccaatctctttcaggtacatgcggaccggatcctcaatgctgatgccatccggcacgctcaagtcgatcttctccatgtccacatcgtcttcttccgcgatcacgatatccacatcgtcgatatcgtcatcctcgtcgccgctgatacgcaggacatcaatgttattggactccagatgttcgaacactctctccatctgctcggcctcaagttccatatccgagaagaaatcattgatttcctgtaattccagaatacttttcttcttttttccaagagataccagttcttttaatttctcctcgaatttcactgtgttttcttccatgtagcgtccatcctctcattgcttgtttatattttatccttaattaatagaaatatgcagtttttgaaggtcctgtagttccctttttgcattcatcaactgctgaagacccttgatatccgtggggtccagcttcttagtcgcctcttctatactatgattcttaatccggataaccgtttcctgcaatgccttttcctgctcttttgccgtcgtcagttccttaatctttgtgtggaacaggctggctacctcgcggtgttcttcttcatccgtaaaatgattcatgatccttgccgggttcacgtcatgcttctcgtactgctcatagagcagctgtgccaccgtcctgtagattccttctgaaaaatccgcaggcgtgatatacttctcaatctgacggaataccgcctcgtctgatgtaagccaagtcagcagtatcttctgggacttgagaatcccatcttccttttccttcttcttgccttgggtgctcttcggcctctccacaggcttggccagtcctgtctggatcgccatcctgcccaccagcttgcgcagatcttcgaaccctacatgataggcgccagccaccgcttctatatagtttccgcgctcaatctcttcatcgaattgcgcaagccgcctggcgacttctttcatgaaatcagtctttccctccggagaatgcatgtcataattcttctccagaatctccaggctgaacatgaatccattcctcgccttgccgatccgctcttcaaaagcctcggctcccagattcttgataaactcatccggatctttatagggctccatccggatgatcctggctgtgatgcccacatccctcagaatggggatagcccgaagcgctgccttggtgccggcttcgtcgctgtcatatgtaagatagacttcctgcacataccgcttgatcagcgatgcatgtcccggcgtaagcgccgttcccagggaagcaaccgcattggcgaatcccgcctgatgaagggatatcacatccatatatccttcacagagaaggaaatatggcttcttggtgctcctcgcccggttcagtccatagaggttacggctcttgtcgaatatcatagtctccggcgagttcaggtatttgggctttccgtctcccataacacggccgccaaagcctatgacgcggctgttggcatccatgatcgggaacatgacccggttccagaacttgtcgtaagccccctgcctttcatccacggtaatcagtccggcctttgcgatcatctcatcctgatatcctttggaacgaagatatttgtagaggtcattgctgtacttgttggcatatcccaggccaaacgccttgatggtgtcatccccaagctcccgattcttaagataagagagcgcctgggcgccctggctgccttttagctgtgcataaaaatactgcgcagctgccttgttgatctccagcaaaatagccttggtgtctgcacgggcctttgcttcttttgagtattcttgctccggaagttccacgcctgctctgtccgccagatacctaagcgcttctacgaaggaataattctcatactccatcaggaatgtgaatacattgccgcccgccccacagccaaaacaataatacatctgcttttgctggctcacagaaaaagagggagacttctcattatggaatggacagagtccaaaataagaacttccctttttctgaagtttcacatagccagagattacatctacaatatcatttcttgatcttacttcttcaattacttcatcggaataatacataatttacaccctcatatataatattcgacaaaagtacttgatttcctttaaattttccaagattctggaataaaatattcctcgaacttcttgatcgcgtatgtatccgtcattcccgcaatataatcacagacaatccgctccggcgtacccccttcttcctccagcatctcaaggaactggtctggaagcagccggatatgcttccaataatattcatagagattggtcaccatgttaatggccttctcttcctcgccttttgctaccggattcttatacacattttcaaacatgaaggcgcgaagggccatggtagcctgctccacttccggagacatccggatctccggctggtccatgctgttgatgatcacattatggatcattgtatccaggcggactctggtagaatttccaagaatctcccgatatgttttcggaatgtcttcctctttgagcactcctccccggatcgcgtcgtcaatatcatggttgatataggcaatcttatccgacaggcgtacgatctgtccttccagcgtatgcggcgtgcccgcggatttatgattcaggattccgtcacgcacttcccaggtcaggttcagtccctcgccctgcttttccagacgcttcaccacccttacgctctgctcgttatgctggaaccccagagggcatacctcgtcaagcgcccgttctcctgcatggccgaaaggcgtgtgtcccagatcgtgccccagcgcgatcgcctccaccagatcttcattgagacgaagagccttggctatggttcgagcgttctgggatacctccagcgtgtgggtcagcctggttctgtaatgatctcctttcggaagaaggaatacctgcgtcttctgctttaggcggcgaaaagccttgctgtgaaggatccggtcccggtccctctggaagacgggacggatatcgcattcttcttccgcgcgctctcttccccttgaatccttgcttagcgttgcataaggacttaaatattcaatctccctaagttctaactgttccctgatcgtcattggactgctctcccatccatcttctaatacctgttatgtacatcttctgcaaaacacatcaaatccctgacttcaattacccttccatcatccatgaccgccctcccgctcatcttgccaaacacctgatgctggtctgtcacgatgacaagcgccgacgtcttcgctgcccggtattgccctcctcagaagtagccggaaggccgatatacccgtcatccgatatggtaaatgccccggcaaattcttcattaagcaccagataataatcccactccttaatgcggaactttggcgcctttatctgacttcggtcatatctttgcaccagctgcctggaccatcccggctcccttaaggagccgtcctcttttaacagagcctgtcgtctggtcacttcatgatttctcatagcctacctctttttcttctcttcctttaatctggcctctatcgcgtcaaccaccgtctgaagcaccttgatccttgcatagtatttgcagtttccttctaccacgatccaaggcgcgtccggcgtagaagtacggatcagcatctcattgaccgcctcctcgtactggtcccatttttctctgttacgccagtcttcgtctgtgatcttccactgtttgtccgggttctcctgccttgcccgaaaccttctctcctgctcgtctttatcaatctgcatccagaattttaagacgatcgcgcctgcgcttgccagatcatgctccatatcattgatctctttgtaggcacgctgccactcctgcttcgtgcagaatccttcaatccgctctaccatgaccctgccgtaccaggttcggtcaaatatggtaatatgcccagcctttggcatatccacccagaacctccacaaataatgatgagccctttcgatatcattcggagaggctgtgggatgcaccacatagcctctcggatccatcttttgtgtcagtcgcttgatggcgccgcctttgcctcctgcatcccatccttcaaatcccagcaccaccggaatccttctccgatacagttctccgtgaagtttctccatcttcttctgcagctgctccagccgcttccgatattcttctttggaataggacaggcttaagtccgccttggcaagaatggattcggtcagtttcttatcctgagcagtctccttttctggttccgtaatctcctcttccttaaactgccccaggcgttccttccttcttacttcctcgaccttcccggccagcgtctgggcgacaatcgcatagatcttagccgtggcaaacctccggtccaccgcttccacgatattccagggcgcatactccatatctgtgcgcatcagcatctcttcattgatcgcctcatactcgccaaactccttattgcgctttaagtcaccttcgcttacgcgccaggaggtctccttggaactcaaaagtttttcaagccgtttcttctgctcttttttatcaattgccaggaatatttttatgagcaccattccatcatccgtcagttgctcttcgaaagagcagatagaccgataggcatccgccacttctttcttcttggtctttttgtcaaaccggtcaatcagcactttgcggtaccagctgctgtcatatatggcaatccgtccctttgacggcatcttggtccagaatctccagaggaaaggatgcatctgctcttcctccgtctccttttttactgcatgtacttcgaatcctcttggatccagagcttttatcaattctccgatctgaacgcccttgccggctgcgtcatatccctcaaatgctatcatgaccggaatccccagatccttgcattccctttggagtttcccgatcttcggctccaattccattatcttctctttatactccgacttgctaagcgtcttcgttaaatccagtttctccagcataggcattccctccctgctctttaggttttctgattcttatgcccattatacaccatatacgcaataaattaagtatttttaattaaatacagaattattcgtctttatcttatattaactggacattaaacgccgtagtctgaggcagaatacttggtgtctggaagtttgcatgggttatgcgaaccatctggcctggccagagcaagctgaatctgatcggagccccaaaacggctggtaaatgaagtcgtatttgtaattataaacttcatctgattgtcgctgttgtctggatcttccgtaatcagaaagttattgtcaaaatcaatcattataatcctgcctatcgtaaccgaggatgaaggcctggggcttcttagaacggtaaccaggaacgcattcgcctggggcggaatgcttcttgtcatacgtgcggaaaatgtggcatttacccaggatcctgcctggatgcagcataggcacatacgctgtccgaaagaattcaggatcacagtgcctctgccaatattcagctggatatcctggatggaagttatattgtttctttcctgcacggcataagagacaaggatttgccctctcgcattattaaaacaggatacgtcttccacaaagccattatttatccgcatcgtgtttccctgctggatcatagtgccacgaggatcattattcataacatgttaccaccaatcgttttattacaatatatgcggattatggcgaaaaggaactttaaaagaatagccggctgcagccagagaaatacaaaaaagataatacaaaaatcccctaatctaccggaaatccagtaaattaggggtgttaactgcggaagatgggacttgaacccacacgagcgcattgctcacaagatccttagtcttgctcgtctgccagttccgacacttccgcaagtgacgcttgaaccgtccgaagaatatattactatatagggcctaaaatgtcaataaataatttcatttttttaaaatttttctccggatatatcggaaggttttttcctctccttcctccgccagcatcttcaataaaaagtgaagcaatgctgctgtctccgggtgtatcatcttgccaagcttggctgctcctttttcataatactccagcggctgcctgtcggtataattactgccctgataagtcttagatgccgccacccggtccatgaacatctcgattacatattttatgggcatcttctgacccacaatgccttctcccggatcgacgctgtaatcaatccagtactcataatgatgcttattccttcccttgtgatgcagccaggctttggaatagcctgtcgcctccctctcggcgttattcgggctcctggtcccttgataatacctgcatcccaccagaaattctgtgggcgaatacttcgacatgtcatgaagcagtccctgtttataaagcccaactttaaaacaatgcttcatgaccagtgatttatgatgattaatcgtgcgcaaatgctgccaaactttcatacttactcctttttctttccctgttatcctatatatctgctaataacaaacaaaatcaaaagatgggccggataaaagatatagaagaaatacttcatcttcttgccccggcttccattatataatgcgatcggaatcatggcaaatgcgccatatccctgtatgctccgattccagatcagattccaggccgctccgcatccaagctttgcccaccggaagcgccgcagctggtagaatataaatatcagcaggattcccctgtagccataatctgtatgaaaaaacactgccatccacataaccagcaagacctcaactgccttctgaggccattccccgcccttctccaggacatacatcagaatcacgccaaggagaagcgtaaaaaaaacattctgatgcgtaaattccagtacctcgccattaaaagccagatcataaggaatctccgacataagcgcaaaagcgcccagcctcgccatatacccgaagatatcgtgggtatgacagaacccttctaccagcagaaaacagaatatcggaaatgaaatccttcctatatatcggaataccatctctgtaggatacaggattgctcccatatgatcaatcaccatcgtcacaatggcaatccatttcaactgatatgaagtaattccagccttccaattcatgccttccgtactattagccatattccttacctgcctgcaagcatcattactgtccgttcgtccagttctacgcttctttgatttttaagcaattccgccttcttaagtattccatcttctgtggaggcaatcttataccatttcttcccttttggcagcgcgggcagggcaaatgtatgcttcagccaatgcatattgtacgccacaaagcaatcttctccttcaagaaccgcaccgctatagtacacgcccagctggcggctggatacctccgatggcgcctgccaggcattttccccatggtaagacacatcaggcacgccgcagcaggtctgatccattccccgaagttcttcctccgggcagaaaaccggatatcctttgcggatggcgatcaaccctttgacaaaagcaaaaagttcctcttcccgttccagtttccgccagtccagccatcccgtcaaattatcctggcaatagacattgttgttacccttctgggaattggcaaattcatcgcctgccagaatgcagggcgtcccctgcgccagcagcacaagggcgaacgcgttcttcatctgcctgtcgcgcagttccaggacgcctttttttcttgtaggcccttctgccccgcagttccagctgaaattatagtccggtccatcctggttattctccccattggcttcgttatgcttgccatcataggaaaccaggtcgcacaaggtgaagccattatggttcgctatataattaaatattccttcctctctggaattatgccgaagccaatgcatgacctccggcaccatgccctcgtcccctttcaggaaacggcgcatgacggtctggaagcccagctgatggaccatgatcttggtcttctttagaaccggatctgcgtaaataccttccatgggcgctaccacagggttcaggatgaatccgtccacatgatattccatcatgtaataccgcaggcactcttcgatcatctgcttggggactgtcccagtaaaaggcatctcaagcacgacttctattcccgccttatggcaagccttcaccatatccttcaattcccggacagcatcgccggatgcggaatacgacgcctttggcgcaaagcagtaggcatccccgtatccccagtaattcctgtactgcagacattcttcaaaatcatataccggcatcagatgaatctggttaatccccagttctgtaagataagggatcttttctactacgccgagaaatgttcctttattctttacctgggaagaaaaatgctttgtaaacccacgcacatgcaggctgtaggcaatcactctgtggtatggaagcctcaggggcctgtccccttcccagtcatattccctggcatagaggatcccgcggacttcgtggttctgcatctctctttttctgccccacacttctctgcctgcaagcgctttcgcatagggatctgccacgacttctccgtcgatcatataattatactcatagtcggatggcgcaagccccttaagagcaagataacgcacttcccctacatccatatccatcggataggccgcgcaaggctcgctctctcctgtccggtacagcaatagccggcattcctttccctccggcacagccacggaaaaattcacctcatcttctaaaattgtaacgcctaacggcaagggccgcccctttatctctttcatgcctaatccttcctgtcgtccgtttatgattattgccatccgtcggttccatacatgtccacattgtctttattgatcatgaatacttcttcataagtctccttctcatagtcatccccatccaatatgctgatggcaacctcagaggctttctttccaatgttaatcggcgattgcgccgctgttccagctatctgggtttccggcttcttcagttccttcttaatatccggggagccgtccactccatagatcatcactttgtcaaggcccgccaggttcaccgctgtcttggcggctaccgccagctggtcattgccgcacatgatggcggtcacatccggatattcggcaaggatagatttgactgcttccagagccttgtcaaactctcccttggtatcttctcttgccactacttcaaagcccttctctgctttggatatggcttcttcaaacccggtaatcctgtcattgatagagttctgagtcggacactcaaggattgccacctttcctccatccggagccttctcaatcaggtcctcgccgcagatatagcctgcgttctgattgtcggagccaatgtaggcgtccacatattccatctcttttacctgggcatccacgttgatgatcttcacatccgcatccttaagcgccttcagggacggcgtgatcgcctcccagtccaccgggcacaggaagatggcgtcgatcccctcatcaatcatctcctggatctgcgccgcctgcaaatctggatctgttgccggatccttggtgatcatccggtatccttccttctcgatcgcttcccttgttgcagcctccagggtaataaaatatggattctccatgtctatggctgaaaagccaaatgaatatgtatcctcttcctcttctgcatcttcgccatcctgcgagtcttccttcaccgcgttatcctccggggtacccacattctttttacatccagacaaagcgaaaatgcatacgagcattaaagccaatactcttaacattctctttttcatcataatagtcttcctccttatgcatcgttttacacgcacaggtacattttacaacatttttactgttttggctactcttttcatttccccttgctttttgcaggttcctttggtacagttaaggtatctattatgcaaaggagagtattactatggatgaatacatgaccgtggaactgacacttgataacgacgaagtcgttgaatgcgcgatcctcactttatttgaggcaggcggcaaggaatatatcgccctccttcctctgaatgaggatggggagaccgaggacggagacgtatatctttaccgctatacagaagatgccaacggcgagcctgaacttgagaatatcgaagatgacgatgaatatgagatcgctgccgatgctttcgacgaatggatggatacccaggaattcgaagaatcaggcgacgatgaatagttcgtttacaaagcgggaagggctcaggcttttcccgtttttttcttttacataacttatgataagctttctcttggcccgggtcatagccacatagaacagccttctctcttcttcgatgtcatccggcgactttgccttcttatacggaatgcttccttcatttccctgtatgatgaaaaccgtgtcgtattccagcccttttacgccatgcatggtcatcagcgccacgccctcccctccctggctgcgggacttccttgcctgctctgtcagcatttccttgtatctttccacgtgctcgaaccattcgtcaatactctgatactctttggaattctgctggatctcttccaggactgccatcagttcttccggctgcatctgccgatacacggcgtattcacgcaggtattcgtcatatcccatgcttttgcggatatactggatggccgcatatggcgtcttattacagatcatcttcatatcccactccagctggtcaatgcggttttgcatccacgccttgtcgcagtaaaaattccgcagagtctcataagtgaccttgctttcgctcatgctgtcacgtccgatataccggttaggacggttggcaatctgaaggaaatatttgcgttcctgctctcccttagccagatgaaagtaactgctgatatccgttccgataaaatgctcgtagatattattcaagcgctctttcatcgtaaatggaacctggtactccatcaaagtctctgacagcatcctggcatccaggctggtacggtacagcacggccatctggctgtatgggattccctggctttgatattcctgtatccgctccagcacgtatctgctctcttctaccggatcttttacttcttgtacatggatggtttctccggccttctgcttggctgcgatctccttgtcaaacctagtcttattatgtccgatcacccgcagcgcgccattgacaatgtgggcgctggaccggtaattcacattcagaaggatctgtctggcattcggataatcatttgcaaactccatcataatgcctggctttgccccccgaaacccatagatggactggtcatcatcccctacgataaacagattgtcttccggcgccgcaagcatgcggatcacgtcatactgggcctggttcacatcctggaattcatccaccaatatatagcggaacttttgctgccacttttcgaggatatcccgcctttttaaaaagaggtccctgcacatcagcagcatgtcttcaaaatctagcttgcgtagtctttgcttcgcctcttcataggcctggtataattcccggaacggtcctgccccgaatcgtatggattcaaaggtcttaatatccaggcagttgttttttacattgccaatctctatggccagatcctgtagattgtctttttcttcaccggcatcttccagttcttcccactctattttcgccgcagcctgcctgatcaggccatatttttcctcttccgtcagcagatttgcctgattcaggctgtaagcccatttcagtatgccataatagatgccgtggaaggtaccgaaggtaaccggctgcgcttcctcgccaagaagcctcctggtacgctccttcatctcctttgccgcatacttagtaaaggtaatgaccagaatttcttctggccttaccttgtactttcttatcaggtattcaattctctttgctatggtaagagttttcccggaaccgggaccggcgaggaccatgcagggtccttccttgtgggcgactgcctctgcctgagcatgatttaaactcatagattccccttacttgcttaataattcaatgccttttctgatacgtgcaagagattcctctttgccgagaatctccataatctccgttgctcctccaggagtgttctgcttgccggatactgcggtccttaccggccacatcacgaatccggtcttatagcctttttcatccacatatcctttcaaagccgcaaacagcccgtcattgctgaagtcatcctggccttttagaatgtcaagcacgtcttttaatacttccagagagttttcttcattggtcttcatcttcttgtgacaatacatggttgtatcatactccggcagttcctcaaagaaatcaatctgctcgcggatatccgggaatatctcgatcctcgtcttgacaagagatgcgatcttcctgaggtcatatggctttgtaaccacttccttgatataaggctctgccatgccatagaatctgtcaaaatccatggctttcagatattctccattcatccatttcagcttcacgatatcgaacacggccggcgacttgctcatatggcgatagtcgaacgccttcaccagttcctcaagagagaatatctcttgattgtcggaagggcaccagcccagcagggctacatagtttaccactgcctccttgacgaatccctgatcgatcagatcctcgtaggaagagtgcccgcagcgcttgcttaacttcttatggttctcatccgtaatcagcgggcagtgcacgtataccggaacctcccagccaaatgcctcatagatcttattatacttgggggcagaggataggtattcattccccctgaccacatgggtgattcccatcagatggtcatcgattacattggcaaaattgtacgtcggatatccgtctgacttgatcagtatcagatcatccagttcctcgttgggaacggagatatcgccatatatctcgtcatgaaatgtagtggtaccctctgtcggcatgttgaagcggatgacataaggcttgcctgccgccagattggcttctacctcttccttgccaagtcccaggcaatgcttgtcatagaccacgatctccgtaccgccatcttcagataccttgctctttaaagaatccagcctctccttgtcgcagaagcaataataggcatccccctgatcgatcagctgcttcgcatactgcagatacaggccggaagcattcctctcgctctgtacgtaagggcctacgccaccatccttatccgggccttcgtcatggataagccctgtctcttccaatgtatgataaataatctccaacgctccgtccacaaagcgttcctgatccgtgtcctcgattctcagcataaaatctccgccctcatgctttgcgatcagataagcataaagcgctgttcttaagtttcctacatgcatcctccctgtggggcttggtgcaaatcttgttcttaccttgctcatgttagtctcctaattcttttaatattttttccaaagtattatccaccctgtcattgatggaaatatcggcaagccgatcggagaaatggggtaccgcattgaccagcaccagcagcacatcggccctttgtacttcttctgccgctcttgtcatgatccggttgtctaccatctcgccaaacaagctctctggattgtaaacatattgtagcacatccgcttcgcctgtatcaaccttttctaagccttctttgcctccaatacttgattcgaaatgcttctcttggaatggatacgatgaatacgattccaagcacgatgccaaacgcgatcttcaccgattccaggcctttctgcgccgccagcgccagctggttggttaccaggtagtaggccgtataatatatgccagctcccggcaccagtggaaagattcccgataccaggaagatggtgatcgggcacttcatcttaaccgtaagcatccgggatatcagcaccactaccaaagcccccagaaaagacgcaaccgccgcggaagcgtatccctgcattgccttgaataccagccagcctgcggttcccgtcatcccgcagcttaaataaaagcgtctggggacattaaacagcacggcatatcccattgtgcccataaaagggcagactatatttatcataaactcatgcatcataataccagccctccgatcatgttgttatatacgcttaaggtaaagccgaccccaatggcgatgtaaacaaagaccagaatggcatcaatcatgcgtacagtgcccgacaggaaatcactgtccgcaatatcccggatggcattgacaaacgccactcccggtaccaggggcatgatggatccgatgatcatcccctccatcttcacctcgccaaatatcggtacatgcttggcgcagatggcaagggtcgtgatgatcacgccgcctacaatattaataatgatctttgacatattgtgctttttccctgccagcacccacatgtacagtatgcatcctatgcaaaaggcgatcatgctttccagcgccgtcgctccaagaagatatccgaaaaagccacttccgactcctgccgccaggatctggaaataatcctttttcggcggtatccggtcgatctctttcagcctctcttccgcctcttccatactaacgtatccgcccgagatctccctggataagtcattaacctctgccacgatgccaagatggggcgcggacagcgggacatgcttcaccttcgtataagcctcttccaggccgttctccgcgctgatgaagataccgtggcttaaggtgaatatatctacatgctccacatggaaccggtggcagattctggtaatcgtctcctccacgcggaagatctcggctccattcttaagcaggatccttcctgcctccagggcaatatccaccactttctttacatctatctcggaatccaggctcttcttcagatacaccatgtccgtaagaaggacgccgtcttcatagattggctctcggtaattatccgtaaaaaaattagccaaaatatgggaattggcgaatccgcacttttcatagaatccaatagacttcgcgcagttccccgtacctacatacatggtatcgcatcggttgctgtaatgctcgcagataaaatggatcatatactttccatagccttttccctggtcgccttccctagttgcgatattcttcagctcgcatttcctgtttttcagcagttccacgacacagactgtcctgacctcgccctgatctatcagaatgaacatctctcctttatcaagatatttgtcaatcatatcctcctgcgggtcggccatcagcagcatatccatatagtttttcttgccttcggttatcagttgaatattcatatcctgctccctgtaaaaatttaatccaatctattatagcaccggcatacctaaaattatagtatatttttgtaaattttagggcaagacctttcaaactgcaaaaggtcctgccctctataaatttcttccattcggataagccaccagttcccctgaggaagaatataagattccgtcttcactgtagtaattgggattccccggcgccacttcgatgtacatcagaaagcgcagatgatcaaaggtttccggcgcgatataagtaatattggtatggatatagacttccatcacaatatcttccaggccttccaaagagccgtactctactcctgtacagtccgggcttctgggaaatgccaggattccacccgttgccacagaaagatccgtgtagctagtgacatgtccctcatcattacagataaatccgtcgaactctttccagcctgcatacaattctaatgccttctgattctctgccagcccttcaaaaggctttgtaccgtcggcatccagataccagccgtcaaactcctttccaagccttcttggaatctcaagggacgctgcatcgaagttctcttgctctactgtaaatgtagtaagttccggaatgccactattgccatatacagataccgtcaaagccgttatggaaacgtcattttcctcatctttgccgccaccgttcaagcctgtctcaggcacctgcaaggttatgtccggtattggagccgcgaacggcagcgcctgactgtcctcgtccaccgacacgggagcctgctccatacttcttctgaccgcgatcagccctccaagcccggagatatcgatcactcctatcgccgtatccggaagttcctgcgcgggaatggacattcccccatccgaaatttcatatccatttccagcgcttcccgacattttcgcacatgtcgatccctgaactcttgcatagatatacagggtcgctaatactccagccagcaagactccgtccgcaatctgcctccagcgaacgtggtgccttactgctggaaccgtcatttttataaccgcttccatactattaacacctcacggtttcattataaaaccataaggggataaagggaagtggcatcttgacacatcaagatgccacttcccttaaacaatctggtgttatcaccgaataaatgctaattaatatatcctgcctttttcagttcttcttctgcctttgcaagattcgcgtcagataccaggataatcggtcctgtgcagcccataccactctctgcatagatgccgatcttccagagggcttttacgccgtcttccagatccatgatctcgattcctgctatctgcgaggttactacctctttcggaggtgccgtaatttcttcctgcgctgcagccggcttatcggcagcctttctcgctgcaagaatatctttaaggcctgcattgttggcagcctcgaattccttctttgcaacttcgaatatcttgcctcttaccaactgtgccgcatagcggatcgctccagcgatcagcggcgcgccggaagcacgggatacaatcatgaccagctggtcatagccttcaccgattcccggtccatatccgtatccggatgcctcgaaacttcctcctgtcgtataggaagacagcatcttaatcaggatgtttcctgacaatgaatcacataccatgatgtccggagagccctgaaggacatcgttgcctctcatgacgcatcctccgtctgctcttgccgactccgcaaatgtaatgtcataaccattttctttcagctgctttaacgcgatctccgtctggcgggcgccgtctacattcagtatgcctacggtcgggttcgcattgccgcaagccttagccgcgatgattccgtagatggcattcttgatcatgccctcgatacggtctgcgctggaagttcctgtggtggttgccacatacatctcttttcccttagctggcgtaatcgcacgccccacagtggatactccaatcgggaatgggaaatgcattgtgaccgctccgtccacttccttgttcttcagaagttcttccatcttcttgtggccttcttcatcattggccactttgaccgttgttactccttcggcctctaatgtaccaatgtagtatacgtcaatcccctcttttgctgcggcaactgccgcttccatggcgttcgcttccccgtgctcgctgcccatgccggtgagggcaatcttcggcttcttgccgaaacttcctgtctccaggccttctgccatctccatgaacgtggtggcaatcatcttttcaatattatttgccatagtcaccaccccttactctgccatcagggtagaagcaaagtctttcatagccttggcaatcagtcccttgacttcttcttcggatactccggctgctgcttcttcctgtgcagctgtgttgccgtggattacaaaggaaacgccatcgaacaggttcgtcatacgtcctaagaacagacttccctttccgataatcatagcgttcttaatcttgccttccttaatatcttcgcaggcaaatcctacataaggcactcctgacggaatgtgtccctgtgtcggagcccatccggtaaggccatgctccttcgtaaagttagccagttctttcctgtcaagctcgccacgttttaccgcaagcgctgcaatcatcttatagttagccatcggaacatctcctgctcctgccggcttcgtgatatccggattctgcatttccggtgaatacttgtcgatatccgtaagtttcattccgactctgtcaagcggatctgataccaggcttccgataactgcctgcggggcagatcctgttcccacgcagtggcgtccgagcatgcctaagtcgatctcagggcttacgccgtcattttcggagattactacggcaaatcccccaaggcagtcttccaggatcggaagtcctttcttgatgtgatccttgccgttcattccaagtttggcggtacatccgccagccgtaacgataaccgtcttataagcgccggacttaaccagtgcagccgcttcaataatcgcatgggtaggagctgcgcagaaccctcttgcgtcagatccggatgcgctgaccaagcctgcgatctcagctgccgcttttgcgaagttgccgccgccgcgctggttcatatcgccgcatgcttcctctgcgcagtcgattacatattctacatctgccttgtcaattcccgcgttgcgtaccgcatagagaatggaaagaacgctggatgccttgctcatcaggttctcatgcattacatgagcagataggtttacatcgatatcgtgtgcaggcttcacgcagcctaccagtttatcttcaaaataaagtccttccgcatggtcatctgccatcagatgctcgatctcggcaagttccactccatccgtaatcttctcaacgatatcttcggagatgatcggattcttggcaaatgcgtctttatactttgctacaaattctttgtccagttttactacttcgaacatgtcgctagcctgcaccaggaagagaaattcttcctccggcatgatctcgccatattttccatagcgctgggcgccttcttttttcttatcataccatgggaactctacctctgacagttcgtccgggtgaacattgccgatgtacgtctgattcggccagtaagcaactgcatcctcataagagcgcagatgcttcggcacttctttcagatattcggaatccggatttacgattctctctgttgtctgggttgttccattatataaaaccatatcaggagtatgtactaatacgtagcttgctcctttgattacactattcattggtttgccacctttcttcagcttattcataagaagagggacggccccttagcgggtacgcgtaggcctgcccctcctcaatcgcctgacgcggcttacttaagcctgttctacctggtctctgatcgctgtcatctctgatacgatgtcatctacgtcaagaaccatttccatcatgctgatctgctcatcataaactgcttcgtcgaattcttctttgatctcaggttcacatacgtgatataccgcgagtccaagctggacccctgtcaatggacctgcgaaagtcggatcgcctaaagtaacagtctccgctgcaagccctgcagcttcgccttctgctgcgccaagaactactactaagttctctgcaccatactcttctgcgaattccttaactctcttctgattctctaagtccattgcgcctgcgctcgttcagacgaaacattccgtggatgaaaatacgatctcagcgccagcagttttcacgcactcagcgattgcagggcctggaattccatcacggtctccgataattattgcttttttgccttctaaaatagccataattatgctttctcctttcttgtgtggtaaacatgttgtttatctatgattcagaaaccatcctttagatgtatttcttaatcatcgcttcaatattttccggagtagcgtcatcctttactacttcctcaaccttggctccatccttatagatagccataacaggaaggcccagaaccttctgtgcgattgcaagacggcgtgcctttgtcgtattcagagatgtgaatttcatcttatctccataggtatcagcaaattcatgtacctttggcattaatgcctggcatggcacgcatccgtctccgtagaagtctacgaatacatatccttctgcctttaatacttcttcctcaaaattttccttcgttaaatctaacatggtaacatcctccttaaaaataatctgacatgcttctttctacctgaactgctgcaattgctccgtcggccgctgcagtcacaacctgtctcagactcttgatgcgcacatctccggctgcataaacgcccgggatattggtgtgcatatcttcatccgtcttaatataccctctttcgtccatatcaatgattccttcgaacagtttggaattcggaaccgttccgatgaatccaaacaggccgaacataccatcttccggatcagcctcgacttttctcgtctcgcctgtcttgacattctttacgatcattccctgaagaatgtcatctccatagacttcctctacaacggaatcccagaagaaatcaatcttcggattggcaaatgccttctcctgaatggattttgcagcacgaagttcattccgtctgtggatgatggttacctttcttgcgaatttcgtcagatacattgcttcttccactgcggaatctccgccgccaacaacatatacctcgaaatcttcaaagaagttggcatcacaggtagcgcagtaagatacgcccttgcccatgaactctgcctctcccttgcatccgatcggccttgaatatgctcctgtcgcgatgatgacattcttgccctggtattcattcttttcactctttaatacctttacatcgccttccagctgtacttccttgatcgtgtcggacacgcgctctgcgccgaacttctctgcctgctgtgtcattcttgcgatcagggatgggccggactcgccttccacgatctgtcccgggtagttctcaatctcatctgtgatcgcaatctgtccgccgtcctggcccttctcaatgatcagcgtggaaagacggcttctgcctgcgtacagtcctgccgccaaaccggcaggacctgcacccaggataataacatcataaatcttgctcattttttgttattctccttcacctatttactagtcgaaaattgtctgtccgtctacttctgttgtcaaagccttcagtgccttttcaacgatgtggcggcgaagttccttctcctcgtctttatccagagccggattgccaagtggatgaggaatggcgattgccggaacgattctgtttgcgcctactgtcatggaaattggcgttaccgtacagatgtgtacgacagggattcctgctctctctacttctttaaccattgttgcaccgcaacgagtacaggtacctcacgtagaagtgaggattactgcgtctactccgtctgccttaagctttgcagagaactctgctgcaaatgcctttgcggatgcaacggctgtaccatttcctgtcgtggtgtagaacaggtgatgcagttctccaatgattccttccttctccatatcacggagaacgtctaccggcagcacgcggtcagaatcctcgtttgcgtataccgggtcgtatccgccatgagcggtctcgtaggtttcttctgtcagatccataacgcctgcgatatcatactctccgtagtgggaagcgctggaactttcgatgtgatccggattgcccttcggcacgattccaccggaagtaaccagtgcgatcttggcatgtgcaagatccttgactgccggattcggatcaaccctgtcgaagtctggcatcggatactctgtggtatacggcttatcattcaactttttgatcagcatcttgactgctctcttagatcctctctccttctcgaagaagttcacacgtacgccgttcgggatatatccttcttctgcggaagcgccgattggctctccttttgcgatcttcagtgtcagaggagccatcttgctaacagcatccctcatgcctgccgcgctgttcttggtagatacgatatataccttgtccttgaacatatctgcaccagggttttcaatgtacattcctgtaagtgcaggaattccaagttcttcctgcaccgctgccgcgatcgtcgcgcaagcaacaccgtaacgtcctgcattgaatgcaggccctgctacgaatatgtcaggattctgctcctttaccattgcaaggacatctgcttttgccttgtccagattctcattgaagtaagagtctccgcatacgatcgtagcgatgatctctgcctcgtctttaaaatttgccataaatgccatacccggtccaaccacctcgcccacgcgaagctctgccggataatctgccttttcttctccaccaatctgtgcaaagaactgattgatgtaatgaacaactttaattttagccattatattatcctcccttccttatctcgcgctcagtttattgaaaccagtctcgtttgttgcacctgtaagtacctgaagttcgacttccagggagccgtcttcgcgaagggtctcctcgcttgcgcctgcaatctttgtaacatagtccagggttccaatgactttatcaagtttcggcaggataattacctgatttgcattaccgccggttacaactgcatctgccgccgcatctgcatctgccagtgactgggattttccatcgcgtccagcatactcgtctgtaatgatgacggtcttaacgccttctgcctcaatcttcttgcagttcatgatcaggtccgtatccggattgccgaatccttcctgagatacgatggctccatcaagatctaacatcttgcagagttttgcagtccagtcggatgaacgctgcttgtctgccagataaacgttctcattggtgataatgtggcatacaaagttcaatgtctttccgtgctgttcgaacaagtcttcaacaaccgggttgttcagatgtacataagtcggattcttgtcgcacgcggatacgcagttaccggatacgatggctccatccataacttccgttggacttaagatggtaggaacaatcttcttggcgtctacgccgtatacgtatgtatcatgcagaagtccctggctctgaagcatctgtacatatgcaactcttggaagttccggatatttctcaaggccttccttgatcgtgcatgtctcatataccttcgtctcgtcaggcgtcaggtcacgtgccaattccccaatatatgcagcgactctgaatcctgcgaatcttacggccttctcgtaatcatgctgtttgattccatcaaccggctcgcataccataaccaggttaagcgtcttggaaaacggagtgtaatctgctccaggaccggtcatatcgatgattccttcctggaatcctacgattcttcctgctgttactacagccatcccctttaatgcgtatgtctttccttcgcctaccgtatcaaccttcgagataacgcccgggaagattccccctcttccttcaacttttactcgcggctcgataacgtctttaaccggcgtgattcttactgattctcctggctttgcaatgtcaaatgatacgctcttgatcttctcgtcttcaagagcaaccgccttagcggcttcttcggatacatagaggattccgtcttcaatcttggactctgaagcgaactggatatccttaatgtaaatgtgtcccatttctaatctcacttgtgattccctccttcaaaagaatattaatattgtttaagctgcaatgctttacaacctctctcaaaaagacctaccaagcatctgccgatgccaatccactttctatcaaggtccagtcaatcaactgaaagtccgcgtatacctcgggcttgtacttgtcggacctgaattggaacttgccgcaggcctgtatggcattttcaataattgacaatgacctttcgtccatctccccctttccctttgacagcataactgatttgtatggtgtttcattaggcttcacacttccggataagggatgtgataaaagcaagtgcccttcgtgaattctgtctctgacttccttaagaacctcttcataggaaatctcttgatatattacattgtgcgtctcgccaagcttttttaaaaccagtggattattggttattataaaataattgccctgactcatcttctccaccttctcctttcggtacattttcgttaggtttttaagcccactaaaaaaggacgatttaaacacatcttgtgcatatatcgtcctttctgtcttttgccctgataatatgttttaaaaaatacgccttaccatacagcacaagattcagaatgcggtacgtttcccagtccttttgcctgaaagtttcaccttgcatgcgctcaccatcatacgcccggcttgcctcttcggcggttggatattccaactctctcttgagaaacatcatcccacttttcaattttacttatagacaatatgaatataacctatcgcctatccctataataacctatcgttattttttttgcaacctcaaaggaaaatcaaacttattttagttgttttccataaatttctaggtggatttttatgcaatattactttttcttatttcttaaaaagttatgatagtaatcgtcgtgcaccttcttgatcatgccgctcagggcgaacaacgccaggatattcggcaataccatcatagagttgaagcagtctgccatgttccatacaaggtcaacctgcgcaagtgatccgagcactacgcatccggccacaagaaaggaatatactttgactgccttaggcccgaacaaatatttcacattagcctggccaaagaaataccagcctatgatcgtggaaaacgcgaagaagaacatgcatatcgcaataaaaatgtctccgcccttaccatacagtgtcgagaatgcgtactggctcagttccgctcctgtcttgccggtaggaattgactttgtcgtgatgatcacaagggcggtcaggttcagaacgatgaatgtatcgataaatacacccaccatggcaacaaatccctgttcaaccggatgatccacctttgccaccgcgtgggcatgcggtgtcgaacccatacctgcctcgttggagaacaatccgcgggccacgcctttggtcagggccagcttgatcgtagcgccgacagcgccgcctgagatggctgccggattgaacgcgccaactacgatcgcgtggaatgcgtatggtatattcttatagttatagatgattacgatcagcgcgccaactatgtaaagggctgccatgattggaacgatcgtctctgttactttagcgattcgcttcattccgccaacaaacacgaataatgccagaatggcaataacgactcccatagctgcctgcggaataccgaatgcggtatggaaggctgccgcaatagagttagactgcacggcatttcccataaatccgagcgccaagatgatcagaacagcaaaaatgccagccagcacctttccaaaggtccctttgaatgcagcgcggatatagtatacagggcctcctgtaatctcaccgtcttttcctacctgcttatacttctgagccataatagcctctgcgaagatcgtagccattccaaggaaagccgcgatccacatccagaagattgctcctgggccacctaccgccagcgctgtagccgctcctgcaatgttgccggttcctacttgtgcggcaatcgctgtcgccagtgcctggaaagaagacatgccgtccgctcccgcctcgcctttcttgtggaacagtcccccgaacgtccgcctcatgccttcgccaaatcccctcacctggataaagccaagacggaatgaaaaccacaggcctcctaaaagaagcgcaatgatcagaatgtaatccgcaagataatgctggattgtcaaaacaatgttattcaatgtctccatgttaatagttccctccttctctcatagatttcagtgatgattccttggaatcatttgatatgtctatgataaaatattgtcaatatttttgcaataccattctgcacgaataattatttttggtgagatttcttcaattgtgtcaatttcacattgaaatttcgttgtgctaaaatatgaaatttgtgtaaaacttccaattattttttgagggaatttttgtggcggcgctcgcgggatctcgttggcaaatcctatactagtgcctgcgttacggtacgtctttcttctgtaatcgtcgaagccctttctgaatttcttctcagcaaatctccggaaattcgctgacgattctctccccgatgatgcagaagcgtaatggtctgccagagccagtccgtcgtgggaggcggggaggaacccctccccgcctcccacgacggacgtcctgcaaaaagcatacaccctacatcatcaaaaatcccttacacattaatctctgccgacattcccagcaaatccttgttctcttccagcataggatttactacattcttaaggaatgcctctacctgtacacaggcgcggcccgtatacttggttggatccatagtcttcttcaattcttcttcgcttaagttaaatgccggatctttagcgatcagttccagcagattgttatccagacccttttcttttacattcctgcccgcttccatggacagttcgcggattctttcgtgaagttcctgtctgtctcctcctgccttcactgcatccatcatgatattctctgtcgccatgaatggaagttcagacatcaggcgcttttcaatcaccttcggatatactaccaggccatccaccacgttcaggcaaaggtcaaggatgccgtcaatagccaggaagccttccggcacgctgagacgcttattcgcggagtcatccagggttctttcgaaccactgggtcgcggatgtgattgccggattcagggcgtccaccattacatagcgtgacagcgacgcgattctttcgcttctcatagggtttctcttatatgccattgcggatgagccaatctgcgttttttcgaacggctcttccacttccttcaaatgctgaagcaggcggatatcattagagaatttgtgggcgctggccgcaattcccgcaaggacgttgagcactctggtgtccactttgcgggaataggtctgtccggataccggatagcaggcctcaaatcccatcttctctgcgatcatcgaatctatcttatcaatcgtttcctggtccccatcaaataattccaggaaacttgcctgcgttccggtagttccctttgatcccagaagtttcaggcttccctttacatattccagatcttccagatccatcatgaattcctgcatccacaaggtagcgcgctttcctaccgtcgtaggctgcgccggctggaaatgggtaaacgcaagcgttggcagattcttatactcatctgcgaattttgcaagttctgctattacatttactaatttcttcctgacaatatccagggcttcagacatcagaatcatatccgtattgtcgcccacatagcaggatgtcgccccaaggtgtatgattcctttcgctttcgggcactgctgtccataagcatatacgtgtgacattacatcgtggcggacaatcttctctctttcctttgccacatcgtaattgatatcatctgcatgttctttcaattcttcaatctgttcatccgtaattggcaggcccagttctttttctgtctgcgcaagggcgatccacagtcttctccaggtgcggaatttcttgtccggggaaaagatgtactgcatctccttgcttgcataccgctcagaaagagggctttggtatctgtcatttgtcatcgtcattgttctcctaatcttttttatagaaagccgggcatgttactcgaaagcatgggatatatccctgcccggaacctccatgggatagttgccggtaaagcaggcgtcacagtatcccaggctgcccaccatattctttaatttatcaatcttcatataccccagcgaatctgcccctatcagttcccgtatctcctccgtggtatgggaatgggcgatcagctgctcattggatggtacgtccgtgccgaagtagcaaggatacagaaacggcggggaactgatccgcacatgaacttctttcgcgcctgctcttttcagcatctttataatattggcacaagtggtcccccgcacgatggaatcatccaccatgacgatcctcttgtcccttacgacttcttcaattacattcagtttgatctttacgctgctttcccgctggctctgcttgggcttgatgaacgttcttcccacatagctgttcttgtgaaaggccattccgtagggaatgcccgactgttctgaatatccctttgcagctaccagacccgaatccggcacgcccaccaccagatccgcgtcgactggataggactgcgcaagcgcttttcccgcaataatcctggaatggtacacgtttaccttgtcaatcgtactgtccgtcctggcaaaatagatatattcaaagatacatcttgcttggttctgcggcgcaatggccattgacagatcagaatgtatgccatcctttgtaatcgtcacaatctcgcctggctctacatccctgacaaattccgcgcccaccgccgcgatcgcgcaactctcagaagcgaggaaatacgtatttccctcctttccgatacacagcggcttcaggccaaatggatccctggctccgatcattttgcggggcgaacttaccaccagcgcataagcgcctttaatcttgcccatagctcttttgacagcctcttcagccatcgatacgttcaggcgctctcttgcgatgtgataggcgatcacttccgagtcaatagtcgtctgaaagatcgcccccgtatattccagttctctgcgcagctcgatggcattggtcagattgccgttgtgtgcgattgccagcgttccttttacataattgataaccagcggcatagcattttcaactttggagcccccggcagtggaataacggacatgtcccaccccgaggttgccttttaaggtctgaagggattcttcatcgaagacttcgttgaccagtccaaggcccttcttaaaatgtaccttgcgctcgccataggtatccgtcactgcaataccacagctttcctgtcctctgtgctgcaacgcaaaaagcccatagtatacggacggggctacatcgcccccatccatatcataggctccaaatacgccgcattcttctcccaaaccggttgtcactttctccaatttgttcatgaatgcaactccttactttatgccgattctcctgaatacttcctgatacgcgtcctctacattccccatatccctgcggaaacggtccttatccagcttctcatgggtattgatgtcccacagtctgcatgtatccggagatatctcgtctgcaagaataacattgccgtggaatctgccaaactcgatcttaaagtcgatcaactcgattcctgcatcggcaaagaacttcttcaggacttcattcaccttaaaggtgtattctgtaatcttttcaatctcttcccttgtagatgcgccgatcgcgattgccatatagtcattaatcaatggatctcccaagtcatcatccttataactgaactcaagcgtaggtgccagcaattttgttccttcttcaatgcccagcctcttggaaaaacttcctgcagccacattacgcacgatcacttccaatggcacgatctccactttctttacggcagtttccctgtcgcttaattcttctacataatgtgtaggaacgccttctttttccaggacctggaaaatgtagtttgtcatgcggttgttgattacgccttttccaacaatcgttccttttttctcgccattaaatgctgtggcatcatccttataatctacaattacaatatccggatcatctgtcttaaagaccttttttgccttgccttcatacaattgttctaatttctgcatgataacacccatccttttctcaattttatcatctggtttgcacgtctgtcggacacgttgtgcacgtattagtataatacaaggcagatggaaaagcaatattctgccttttattaattatcaccaaattttcctaagaactcctgcattctttcattggaagagccaaaaacatcatccggggttccctggacggcaatgtatccattgtccatgaaaatgatatgatccgatacgttccgcgcaaaattcatctcgtgcgtaacgatcaccatagtcatatgctctgccgcaagatccttgattaccttaaggatctctcctgtaagttccggatccagggccgacgtaggctcgtcaaagaacaggatgtccgggttcatcgcaagggcccttgctatggataccctctgctgctggcctcccgagagctggtacggataggtatcctccttgtccgacagccccatcttggtcaatagttccctggcctctttatagacttcctcttttttacgtttctgtacgcgaataggggcatccgtgatatttcttataacggaataatgagggaacagattaaaactctggaataccaggccaaacgtcccttcataatgaatctcgcctgcgtccggcgtctccaggttcgtggcacaccgaagcagcgtagactttccagagccggaaggccctatgattcccagcacctcccccttttctaccgtaagggaaatgtctttgagcacttccactccgttaaagctcttttttatatttttcatctctaacaagctcatggcatgtcctcctaacgatagtaattcaatttcttttccagcgcttccataacgactgctacaatcaggttaaatacataatagaagattcccgcggctacaaatggcaccatggaagtctgcgcggccgcaatctgcttcgcgatcgtaaacatctcggccactgccagcacgaacgcaagagaagtatccttgacaagcgtgataacctcgttcgtcacggacggcagtattctcttgattacctggggaaagatgatgcagaagaaggtctgaggcctggaatatcccagcacttttgccgcctcatactgtcccacggacatggactcgatgccgccccggtatatttccgcaaagtaagcggcatagttgatcgcaaatccaatcagcacggcagtcatgcgataggtgctggaaattcggattccgaaaatatagtacggcccaaaataaacgaccatcagctgcagcatcagcggcgtccctctcataattgatatgtatatcttagcgagccattggaccggcttgatcttcgacatccttccaaatgccaccgccaggccaagaggcaatgaaaataccagcgtcagcacaaatatttcaatcgatatcagcattccgccgctcaactctctaataagcgttccaaaatccatcaggttttcctccaacttctcaaaagacgcggcaaaggagccagtcccttatatctggggctgacccctgccagtcattcacgtatttactatttctttccgatgcagagggatcctggcacgccaaaatcttcatacttctctgcaatctttgcaaccgttccgtcttccgccatctcatccaatgtagcctggactttgtctctcaattcttcattcccaagtttgaatcctacagcatactgctcagaagagatctcttcgtcaagcaccttgtaatcatccggattctttctggaattaatctggtagtatgcaacgccgatatccattgcgatcgcatcgcacgcgccggattccagatccatgaacgctgtattgtattccgcaatctctgtcaggcttccaaatgtacccgccagttccttctggtctccctggagggctgccaatgcggatgaatccgcctgggtctctaccagttttccagagaggtcatcaaaactattgataccggaatctgttgcaacgacgatcacctgcttgttgtcgatatatggatctgaccaggtatactcgtcctcgcgtccgttcatggtgaaaccgttccagatacagtcgatggttccggagtcaatctccatatccttggcatcccagtcaatcggctgctttacaagcttccagtcgtttctgtcgcatacttcctgtgcaagttccaggtcaaatccgacatattcgccatcgtcatccttatatccatatggcgggaaggaagcatcgaatcccacgatcaatgtctcgtcatcgttttcgacctttgcctccttcttatcttccttcttgttgtctgcactcttgtcttccttgctgccgcagcctgccaggaccgttgtcgccagcatggcaagggcaagcagcaatgttgctctcttcttcataccttttcctcctgcattacagtattgtggaatcgcaatcactgcactcttttatcatgttatcaattgattactttaccacgctaaattgttctgttatattagcatattccccggcttttgtcaatcctgcgatactgctttttccatttcaggaactgttcttccggcatgtcgatatccacttcctggcgcgccttcttgatctcttcgcgcaggaccgaatccatgctcagatagatgggattgccggaaagcatcttcacatactgtgcctcgggcagtaccctgaaacagcagtagagataggctttgagcatatccggctcctcgcagatgcggtaggcttcctgatacatgcgggccgcctcttcatacaggaacaggtgtccataggctgctccaaggcaggcatacacatgcccatagaaagtcttttccacagagtcatcccattctttgttgatgatggactggtacaccagtatagcagtctcatactcgccgctgccctgcaggctgtctgccttatacttcgtcctctccacatccttctgattctgcagatgttccagaatattctggatccggttgatgtctgcggctgcatatatggtagattccttcaatatggtcagcacgaactgctccatggagcagttctgacgcaattcttcccgcagcgtctccgcaagtccggaaagttccagttcatctccgatccagtcgcacaactgtctgtttataatcgtataatcaataagatagaggttattgcagatatagtaacataattcctctatcgtatatattctcatatgaaccctggatatctcatagggttgtttggcgcgcttcttatgacatagaattaaactgcccattgattcctcctaaatgtaataccttttccacctgaaatcctgtcggaggatagaactctccgaaccctacatccttgaacgtcagtttgcaggtacgctcatccataaacagcgcttctatctgaaggcgcagggaatagtcccgccgctccggcagaccttttaaagatatggtctccacttgaagttcttcgcctgccagcgtctccacatggatctcgatgtcggacgtatcctccagaatcacttcccattgcccgtccgcctcgtaccagtgcgttccccaggcgacaatgggatgccatccttcctgcccgttcacccgcatgcgcaggcagatctgctccgtcatctttgtatcgtccaggtatacaggcccctcatcataatccttgcatttacgcatggatgtatagcaggcccccctgctgtacaggttgttgccaagaaatgccctccggccattgcacagcaccttcagggaattgggataccagttattctcgaacccttcccccgtaagatacacagaagataccaccttcttttcaaacacgctctggatgaagcccttgaacctttcatccgcatcctttgccttgtccacattcagcaccggatagatggctgccagttctttcatatgagcatttgccacttcgtcgacggttacgaacatatcgtttccccgtccgctgatggtgttcagttttctgagcatatacgcccggatctcctgggcatcacagtagaacagggcagactcatactgccacagttccttgggctggtagaacatatactggcagaaactttctttataatcctgcacatacacgtactcctttggcacgcccagatgatgcccgattcctttcagcatcttcgacatgtcaatgttggtaaaaggcaccgaaaaggtgatgaatgcgatctctttgaatttttccagcgtaagacttacgaatttggccagaagccacaccgcgtcatgggtcttggctcctaccctcactttttcctgccttaccgccttgccaaacaggtccgctacggtgcagccttcattgatggccgccagccgtttggcttctttcccgtagacccagtggtctttatagtatcccagcatcagaggaatctgataattgtctacggctacttccaatgtctccggctcgtctttggtctcatcgtaataactgatctgacaatgcttttcattcaggtcataccccagaatactgcctgttctcactatcatatcctccttcttctaatatatcttgaacatctggtccgccaggatttcttcttcctggaattccagcatcgcctgcctgcggttcgcagggcccatcaaagccattccgttcaaccttccaaacttgccgatgtcaggaaattctctctcattgcgcagttcctttttctctgtcgtgatcgtgtctttcccattcgtctcctggaaatagtaattgatggattcatccttatataatacaaactgctttacatacagattctcatacattggcatcagaatctccgactgatagcccagtccttcccgcattccctgcttcatcttatgatacagttttaccctgctgccgggcctggactgataggagatcatcaccttgtcatagagctggacttccctcagccattcttccttatacttcaggtaatatggaaatacgatctgcttctcgcacatctcccgcaggacgtagtgaagcacgtcttctaactcggccgtataatcacggctggaatagtatttcagaagcgcgaccttgcagatatccggcagatactccttcttgtcgcactcgttggctatcatatcgaacacgcacagatccaagtcccttccgaatactacgtattccctggaaacataggcaagataggcctgcttcagccgaaaatacacgctgtcagacagatagtaatcttcaaatatcttctcctccgcgaaaaggttctccgaaaagaccatctgcgtaataatgcgctcccctaccttacaggaagggattgcgtattcccttaagatcttccacagacgcttcatgtccctggtagccccgcagtaataattggccagatacattaaagtcaccttatcatactgctgcattttaaacagttcaaagcacagataattcagaaattcatcttcctcgtagttgtcttcccggatccgcttgctgcacaggcggaagacatccttctcatcaaaagcgctgattcctttgatccgcagattctcaaacgtaggctcttccttttcattctcctgcttccacacgccggtggatgccgcatacttgcggcacatatctaagaatctcggctcgtagaacagccttctggtctcataggcaatggaatccgtatagtgacgcccttcgatagactcccatacaattctggattccttatcatacaggcagataacggcaccctcatcctcatcgtaaggcacccgctggcggatggagccatccttttcaatcaccagaacgcagttcatgttcggcaccttcgtggtaatctcgtaagaatagcagatatcacgcatggcctccatgcgctctgccgtcatctcttcttcctggcagaacctcttgtacaggatccgcagcggctccgtaatatgccgcttcagcaactgttcccaggtaaacgcgaccatctgctcccggtaattcaggtacagatcccccgcagtctcttcgtaggtgaccagattggcgtacagaaatgccgccttccggtaattcagagaattcccatgcatgaagtagagcaggatggtcttcggaagcggccctcttgcggaattctcgtctatggtcatcatataatactcatacagctgggcaatcttaagttcagcgtccaccgccctctgataccacacaaaatagcgctgctgcgtcttgtttcccttgatcaacaacgtacagatcgtattcagtatcataggctcgctgtacatcttgtagatgcgttccaatatccggaacatggcatcgctgtagttcttctgctggctggcaaaattggaaacatacagcgccagttccttcgtcatcagacgatatttagaagcaaaattcagaacctgtatttcaaaagcgcccagttttttaagaagcgtaggcttttcctgatagcacatataggcttccagataaaacaggacctcatggatgccatattggaactgctgttctaacacttcgatctttttaaaaggatttttataccgcggatccagatacaggatcatgcgaaggagagcccaggaatcctgatgccgcatataagtcttccctatctcgtcaagcacccggtcaacatggtttccctggcctctgatctgcgcggtcagatataagtagtagcagttcgtcaccggatccttgccgatggcgaacctgttgtaattatagttctccagaatccatttggcttcctcgaccttatttccaatcaggtaaatatgggcctgaaggagctggtatacttcattctggggttccttttttctcaggacggccatcttctcaaccgcgctctccacccagttgttcagttcgatccttccgcctacatagccgatatattccttcaatatctgagcgcttaaaagttccgggattctatgatcctcgtcatactcctgattctgcagcacctcgatctcataggtcagcgtctcatagggggtcacgaacttcaaagcgccataattcctgccgccgtgcagccgctccggccgaaccacatactcgatctcatgggcattacccacgaaatcctctgtgctgatctccgggcgcaggaccttgataaagtttccctctgcctcgatccggatgggcatatatccccaggtgttcttcatcagcgtaagcgtgcccttagtcggctccccgatgtcttcaaacagcattccctccccgggaagggtcaggaagatgcactctttctgcttgatgcctaccaggaattcctccatggcctgctccccaagggaccatttgcgcatattgtcgtacaggtagaatatcctttcattctcatacttcaatatctcatagaattcccgggaacggaacagcctccccgcttctgagaaatccttgatcgccagtttccggaaatcatccgtgctctgcaccttcccataggaggtcatgacatacggcttttctataatggcggtaaaagacagttcatactctccgccggtacacacgacggtaaacttgccttcctccacatggccagggcgcagtcccctgccgtcatacgtaaactctacttttgctggattcccctcaaatccctggtctttaaaatgaacacgaaaagaagacgggtatacaagtccccgtatcgttcctttgctattcgtcttcattgtaaaacttcccctgtatacttccccttctcctattatgagaaccagatttgtttcatcaaatatgacatcaggtcgtattaactgaaagtctccttttgaaaatttctggattttatttttcaagtctgacacctgcttctttcgttgcatttttcaaaaaacatactataatgaattatagcattgtttcataagtaatggcaatgccggaaatacaaaatctcgaaaatatatgaataggatgtatagatatggaaaagaagcctgaatttcacggaagcgatctggaaaagatcgcaagttattatcacatgcgcaaggaggatatcatctgctatagcgccaatgtcaatccccttggattgtcagaaaaggtaaagagccagcttgccgccaatctggatgtcatcacccgctatcccgaccgggattatacaagtcttcatgagaccataggggcctactgccacgccgatcccgggcatatcgtggttggcaatggttctacagaactgatctctcttctgatcagcctgctctcacccaagaaagccctggtcctcggccccacctattcagaatacgccagggaactttccctgatcggcggcgctttacagtactaccatctgaaggaatctcaggattttgtgctggacatccctgattttcttcaatcgctgacggatggcatcggcctggtcatcctctgcaatcccaataatcccacctcttccgccatacatcaggcggatatggagcgtattataggcgcctgcaagaaaaaaggaatcttcgtcatgattgacgaaacgtatgcggagtttgcgcccgatccttctgctattacggcaattccccttgccggcagatacgataacttcatggtgatccgcggcgtctctaagttttttgcctccccgggcttaagattcgggtacggaattactggcagcaaggaactcctctatgccctccttctccaccagaacccctggagcctcaacagcatcggggcctacgccggggaattgatgctcaaagacagcgcgtatatacaggctacctggaatctgatcgactccgagcgtacccgggtctgccaggagttaaatgccatagacggcttaaagatatataagccctatgccaacttcgtcctgatacggattctgaaagacggccttacttcctttgacctgtttgaggcggccatccatgaaaacctgatgatccgggactgttcctctttcgagaccttggaaggcgagtatatccgcttctgcttcctgatgccggaagagaacgaccggctgatcgactgcctgaagcgtgcgcttaagtcccggcaatgagaccggcgatgagaaaagaaaggccgccaagctgtggatatgctgctccacgctttggcggccttccctgcctgtttcttttccttcttacttcttaaggatcaatgccacaaatgtcagatcttctgtccctgtattcttaattccatggccgtctccgtccttgcagaagaatacgtctcctccctctgcgggaattgccttgccattgtcttcgtacattcctgttccgctaaggatgtaataggtctccgtctccccgtgatgctcatgatgtcccaactcgcagttggcaggcaccgtcaccttgctgaacatcttgcagtgctctcctaattcctcctggcttataaggccttccttcataatgaagcccgctccgccatttacgcgctctacctttactacttctctttctcctgcttttgtcattgtgctgttcctcctctttcttaacatgatttatcagaatatttttattagatatattctttctgctcaaaatatctcatcaggatatccgcacagttctccacgcccagatcggaagtattcagaatcatatgatagttattcacgtcaccccaggctttgcccgtgtgctcatgataatacctggaacgctccctgtcgttcgcgtcaatcttctgggcagcctcttcatatgtaagagattccttcttcataatacgttcgatcctgtcttccttgtcagcacacacatagatattgaacacgttaagcctgtctttcaatatctctgacgcgcaccgcccaaggataatgcatggcttctgtgccagccctttgatcgcttccacttcggattcataggtattcctgcttagttcctgttccacgttcaccttgtcatataccggaatcccaagcctcttcgacagttcctctgcaataacgcttgctccggtaccatatctgcggctcatcgtaatcaccaatttcataccaattcctccttcgttaattgttttatgtaagtaggtattattataacactaaaatcataaaaaggcacgtaaacttttaagccaggataaaacgcgggcagggacgcatgattttaaaatgctatatccctgcccgcatgaccggcattgattctaattcacgattttatagtattccctggcagtcaggctgtatacgatcgcatagaacactgcgaatacaaccaccgtgatgatggtgcacgccatgaacagcgacacattcacaaggttcagcacggccagcaatttggtgattaccttaaaggctacgatgatatggatgatggccgtgataagaggaaggaagaacacggtaagcacttggcttctgatggaatgccttacctccttcttgctcatgccgactttctgcatgatctgataacgctccttgtcatcatatccctcggatatctgcttatagtagataatcagcacagtcgccatcaggaacatgacgcccagatagatgccgatgaacaaaaggccgccgtacagcatatagaacccttcccggttcagttcccggctgtcgcagaatgacggagtggtctcggactctatccggctcttgatcgtttcctccgctttcatgcacgccttctggctgccctccagatcaaatgtgacaatatagtctatattgatatgctgttccttccagtcaacctgcatgtcgctgtctgcgtaagcctcattcaggaactgctgcatgatttcctcattgttgacaaccatataaaatgtaggcgccagccgcccctggctcttctttgccaatgggaacttctttaactctttggctactttgaaggtggcagttccgatctttgccgtatccttgccataggtatccatagtatccacaaagactagtatctcgtcttccgcgatggatacgttttcatcagccagcctgttatattcatcctggctgatgaaaatcagcgagcacagatcctctgccgcatagtttcccgtctctataagggaaaaatcgcttcccgtacggatggcagacaggtctgcctgtctgtggctggtcatattcttaaccttcacacctgcgcttctggactcttcctctataatccggtcgatcttatccatattttctttggtagcgttatagttccttgcctcgaattccgtggggaatctggtttccagcacgtcgttcattccggtatacagggagatcgtggtggaaatcatcaccagcaccatggtacttaagatgcagatgttggcaagtcctaccgcgttctgcttcatccggtagatcatgcctgatatggaagtaaaatggctggtcttataatagtaattcttattcttccgcagaagtttcagcaaagcgatgctgcccgccgtaaacagcgcataggttcctatgatgacacagatgactgccagaaagaacttcgtgatcgcggtaagcggagattccgttgtaatcgcgatgtaatatccgatcccgatggcaaccactccaaatatggtcagcagccattttgtctttggctctttttctccctggcttccgcctcttagcagctccaccgggttggagagacggatctggagcagattgtagatcagcgtcatggcgaatatgacggcaaaaaggagcagcgtattcaggagtgctctgaccgagagttcaaataccatatttacgtcataatgtatgattttcaaaagagcaaggaacatcagcttgctgaatatgattcctgcaacaagtccgacgacaatgcttataaccgctattatcaaagtctcaatggtcagcatcttggcaatatgccgcttgcccattcccagtatattgtagacgccgatttcctttttccttctcttgatgaggaaactgttggtgtagaacaggaagattacggcaaatacaatgatgactaccgtcgcccaggcaaggcagagccgcagattcccgtctcccacgctcttatttctggacaaggcgtctataatatagaacatcatgaccgtaaggatcgccgtcagcatgtaaggaatataggttttccggttattcttcaggttggtgaccgcaagttttccataaactgaactattcaacctgctcaccccctgttgtcaacacggtaagcgtgtcagagatcttctggaacatctgctcatttgtaagatttcccctatacagctggtggaacacttctccgtccttaataaacagtacccgtttggcatggcttgcggccttgacgctgtgggtaaccatcaggattgtctgcccgtcttcgttgatggcattaaaaagcgtcagcaactcgtctgccgccttagaatccagcgcgccggtaggctcgtcagccaggatcagctggggtcttgtgatgattgcccttgcgatcgctgccctctgtttctggccgccggatacctcatagggatatttttccagcaatttctcaatgccaaggcgctgggctaccggcttgatcttcttctccatctcgtcatacttcttcccggaaagaaccaacggaaggaagatattatctttaagagaaaacgtatccagaagattaaagtcctgaaacacgaaacccagattctgccgcctgaatgccgccatctccttttccttaatctttcccagatcattccccttcaagtacaccttgcctcccgtcggcttgtcaagcgaagccaggatattaagaagcgtcgttttccctgacccagattctcccattatcgctacgtattctcttggttctacggagaaacttacattctttaatgcctccacctgatttccggcaaaccgggtagtgtatattttctttacattctttacctctaataaagccatcttatattcccgtcctttcatctattctttgtttattacaaatcatattatagattatccagaactctccttccatcgaatcaggttacattctcctggcccaaccttacaaatttgtcacaaactgagcctatttccgcattaaagggcatgtattgatcctgcttgaccatcagggactggaacagtttctgtgatttgccgggcggccgcttactctgggtcaagcacatttctctcaagatacaggaatacttttgtgccttcccccaccttcgactctatacggatgccgtgtcccagcctgtccagaatcgtcttgcacagatacagcccgatgccggtagacttcttgtctcttcgtccattaaatccggtaaatcccttttcaaacacccgtggaacatcctcttcctggatcccgatgcccgtatcttcaatgaccagttccttctccttcatatagacggccactgtgccttcactggtatacttcagcgcgttggacaggatctgctctacgacaaaggccatccacttctcatccgttaggatcatctcctccggcacatccatccgaagcgcgatcttcttcaggataaacagctgggagtatttcttaactgcctgcttcacgatatcgtccgcggcataccattgaagcaccatatccgaggacatggactccatccgaagataggtcagcaccatctccacatattgctcgatcttgaatagttccatcttcaaagtcttaaccgcttcttcgttttcttccgtcaggtcctgggactgcagaaggatgcgcatggcggcgatcggcgtcttgatctgatgggcccacagcacataatagtcgagcatgtcctgcctgcttaactgcgccgccgactccagttcgcttctactctcaaacagcgcatttactatctgctggtagtcccattctgccagggtatccgccttcggcaattcttcccgttttacctggaggattcctttcatccttaacagttccctgtgctttcttctgcagttcataaaatccgccgccacaaatccgagaatccacaatagactcagaagcaaggcgtattccagcgcatccattgggatattatacaaatagaatagcaaggcaaatatggccatgatcccggcgtacatgcctattcccctgatatgatccctgatatatcttcctgtcaatctcatgcctgcaccatatatcctattccttttttcgttacgatccagtcttccaggcccgcaatgccaagcttcttccggagcctcgcgatattcaccgttagcgtattctcgtcaatgaactcgtcgctctcccacagccgggtgatcagatcatcccgcgggactatcttgcccgcgttctcaagcagggtctggaatatcttaaattcattcttagtcagctcgatcttttcgccctggtaggaaagagaggcgtcccccaggttcagcagcagtccattatgctcaatgatattggcagagccatgaaatgcataggttctcctcaacattgcctggactttcgccgtcaccacgttcaggtcaaagggcttttcaataaattcatccccgcccatattcatcgccataacaatgttcatattgtctcccgccgatgagataaagatgataggcacctttgacagccgacggatctcctggcaccagtgaaacccattaaaaaatggcagcacgatgtccagcagcaccagctgcggatcatattccgcaaatatttccattacgttcttaaagtcttctacgcatgctacttcatagtcccatttacgcaaatgggatgccagcgcttttgcgatggtcatgtcgtcttcaaccactaatattctatacacggattatcctccatcctgcaagttaaaataagagcagaagactgaacatcccctgctctttcatcctatacaattcttgtggttttgtcaaatcaatggaagtagtggtctccaatcctcatgccatagccgccctggtcaaaatacaggcatccgcccacagggttggctcctgacagcgcgtctgccgccgcctgcatggccgaatcggtatagccgccggaacttctgactttgtccagccatcctgtggacaccgggccaaactggccgggctggtagatgacttcctctatgctgttcggatagatgccgctgtttacgcggttcataaccaccgctcctacggctacctgtccctcataaggctggtttccggcctcgcagaatatgatggacgcaagaagcgtctggctttgcttaagaactgcggctcttttagcctcggcctcccgctctgcctgctctcttgcctcctgctctcttcttgccgcctcctcggcggctcttttcacttcttcgtctactgccgaattggcacttgttactatattggccggaactgcctgcaaggcattcaattgtatttcagacgctatattctccttcgtacttaccgcagtctttacttccggctgtaaagaggctgcctgactggtaaatcctactgtcatcaatgaacaggctgaaaacagcgcgaacatcgaactcagtctcttattttttatcataaatttataccctcctattattgcaatgcatgaacattgtcttaataaagtatattcaaaaatttcaactttattacaattattacaaatttgttacatttgcaacggtgggtatcgtaacatatcttcacatttctgtcaaatctaaatggattcccgacggcagtaagtcactgcggtcaacaccagaaacagcggaatctcaaggattgcggcgcccatgatcagatacggcgtccagatatatccagtgccaaggcggataaaatgcagtcccatcatttcatagaaaaaactattcgtcaggccgattccccctgatgggaatatgcatcttagaatgtctgccacattgctgcttgacaccatataaatgatggtcggcagcatgcacagtacaatgcttcctatgatggcagcctgcacgtttctgcacctggaagacaaatatagggcagcacagactgtagcaagaagggagcataagcctgccagcacgacagttgtccaggcctctcccagcgtcatctgaggcatcacgaatgctgaccgcagcatctgcagggaagtttgaagtccttcccatccgaaggcctgattcgtaataagaaggaagaccgcggttcccgcaccgaacgtcgccagaaaaatgatcagcatggctccgatctttgtagcagccagccgcatgcgtccatgcctggcgcagcgaaggatgctgtcagcaccggtctgatactccgcgcagaacacaggcgctgcgataaccgcgaagataaacatcaaaagaaacagatacaagaccagataatcataggattccgcggaaaaccccggcacataggtaaacggcgtctcaatatccgcgctgagcctttcaatttcttcctgctctttctcatcctttcccatctgtttcaaacgttcccggtatttttcataaaacccagcgacatcttcgggagaaatatccgcgtccgtcatggtatccacgtacacctgagaatctgcaagcaccctggctgcccgttccagaaccggatactggggcgctatcttctcattatacacctccatcggaacctccggaggaaaagcgcttccatattcctgataacattcccgaaagtccttgactgcctttgccaccttttcctccgttatcaatccggctatggcctgctcctgctccttcttattctggattgcttctatccccgtaagtttcaccgtattcccccttgcatctgtcttataggaagtcacgaaagatatgggaaaatatgccaataccgctgacaggattaaggcggcagcaagaagcatccaggttgagcgggtctttacaagcctctttagttctaagcataacagtctcatattacttcctcctctcttgcatgttccgggaacagccacagatataagtcttccattcggggctccgtttttatcgagcctggtataacagccgtatccgccagatagcggacctgcaagtctccatcctccttattatagacatttaaaattggcacccgctgttcaaaagccgcaagttccctgggatcgatctgggcattccataccttcccgtccacttcccgtaccagtttttccgtcttcccagtggcaatgatcctcccttctttcatgattgcattgcaggtagcaatatattccacatctgagacgatatgcgtggatatcagtacgatcctgcccctggcaaattctgagagaaggttgcggaaccggactctctctcctggatccagcccgctggtaggctcatctaagatcagcacttccggatcattgagcattgcctgcgcaattccaaccctgcgcttcattcctccggacagtttggatatctgcttctttcttacctcctgaagcgacagcatttccagaagcgcttcaatcttcttctttgtctccgcctttccaaggcctttgagggccgcgatatattccagatactcccacacatggaagcccggatagaatccaaactcctgcggcaggtatccaaagacatcccggtaggattcctttaacgttccaatctcaatgccatcataccggacacatcccgatgtaggcttttggattcctgctatcatacgcataagggtggtctttcctgcgccattggctcccaaaagcccccatatgccgggcgtcagcgtcagggatacatgatccactgcccgcttgtctttgtattgctttgtaatatcacagatttctaatttcataagcactcctttctggcgaggattgtctgataatacagtatacggatacggctgccgccggcagcatgatcagtatggctatgcgccacgcggccatcgtttcgtagacctggggcatcgccttggctagaagcagcaatgccaccataaggcccgcacagtatccttcgcagattccggtccccacatcctgattccctgactttccacttctattcagtatccagaagcatccgctgcctgccacaagaaatggaagaaggaaatacagcgccatatccatgcctgacattttcagaccattcgcgatcagcgcggcacagatggaaaatacggccatgctgcctgccgccatcaggatcatattagccatgataaggcttgtataggacagcctggtagacgcttcaatctcatacatgcggtactggaatgatcgttgcatgaacggaaccgccatcatgatctgagataccgccagccctcccagcatggccgggatatgacggattccaagatacgaaagattcccgtccagcgtactgtataagactgcaaatactgccattgccataagtccctgcatcgcccagagcctttttcctaaaaataggacctgccgaaggaggaatcttacaaaccctatctttcttcctctctgatccagcgcctgcatccgccggatggattccagcatctgctctttatgctcgtttgtattctctggaagttttgctttcagcgctgcagccagttctttttctaacgcttttctcaacgtgcttcctcctttccgatcttttcttcaatcttttttaatccagctctttgccgggattggacggttcgcatcgggattcccaatactttggaggtctcccgcaaggtaagatcatgggcaaaacgcaggtatatgacttccctctggtcttcgggcagcgtctccacgatctgccggaacccttcctcggattcagaatacgcaaaccctgcctcctgatattcgatctgttccgtcagatgcatttccctgctctgcctccacgtgtccacacaggtattggaagccaccttatataggaatgcccggaacttccccttattcttatatctcgggaaatagcggatcaccttaagaaacgtctcctgcacggcatcttctgccgtttcccgatccctggtatggtacaggcagtagcggaggatgtcgtcgtagtacatggccgccagttcttcccagcatgatgcatcgcctttttcaattttccgtaacagttcattttcgcgcgtcaaaaccaatcctccttaagggcgtcccctatatagataacgggtgaggaaagcaaaatgatcagatcatctgcaaaatatttaaaaaaactctcttccaggaaagcaagcctgtcatatcgcttgtttctctgaaagagagtttttgagactctggttcttttatctttatatcctggcgatatcgatcaacgtcagtttcttaatatccgtgttctccaggctggtgatcaaagcctttgccgtatcgatggccgtaagcacattgacgccggtctcaatggcatttctgcggataacgaatccatccctggaacggtctgctccctgaggcggcgtgtctatgacaagatcaatcttatgtcccagaatcagatccataaggttcggggactcctgctcgatcttattgaccgcattggccttcacccctcctgacttcagggcttctgccgttcctctggtggcaaatatacggtatccgatccgctcaaacctgcggccgatttccaccgcctcttccttgtcctcatctcgcaccgtgaggatcatattcttatgcttgggaagtttgatgcctgcgccaaggaaggccttgtacaaggcctcgtcaaaggtccttgcgattccgaggcattcgccggtggacttcatctcaggtccaagactgatatccgctccccggatcttctcaaaagagaataccggcatcttgacggcaaaataatccgcttccggctgaagtccgggttcatatcccaactcccggatcttatgtccgatgatgaccttcgttgccaggggaacgatagggatccctgttaccttgctgatatacggaaccgtacggctggacctaggattcacctcgattacatacacatcctccccgcacacgataaactggatattgatcagcccaatgacatgcaaagagcgcgccagtttcttcgtataatcctcaatcgtgcgctttgttttctccgttatgctttgtgccggatacacggagatgctgtcgccggaatggattccggcccgttctatatgctccataatgcctggtatcaggatatcctccccgtcacatacggcatccacctcgatctcctttccctggagatatttgtctaccagaatcgggtgatcctgggcaatccggttgatgatgccgatgaactcgtcgatatcatggtcgttgatggctatctgcatcccctggcctccaagaacgtaggatggccttaccagaaccgggtatcccagcctgcctgcaacttctttggcctcttcggccgtaaatacggtcccgcctgtaggccttggaatctgacactgctccagaatctcatcgaacagttcccggtcttccgccgcgtctacattctctgcggatgtcccaagaatcggaacgcccatcttcatcagcgcctccgtcagtttgatggctgtctggcctccaaactggaccacagccccgtccggctgctccagatctacgatgctttccacatcttccggcgtaaggggctcgaagtaaagtttatccgcgatatcaaagtcggtgctgaccgtctccgggttattattgacgatgatcgtctcatacccttccttggcaaatgcccaggtacagtgtacggagcagaagtcaaactcgatgccttgtccgatacggatcggaccggagcccagaacaagaaccttcttccttccggaagtctgtaccgcctcattctcactgccaaataccgaataatagtacggagtctccgccgcgaattctgcagcgcaggtgtcaaccatcttataggacgccgtaattccatactccagccgcatatcatgaatctggcgctccgtattgcctgtcagccttgcgatcacgctgtccgggaattccaggcgcttggcctcccttaatgtctccgcgttcaaagaactgttctgcaatttttgctccatttctacaagaatggcgatcttgtcgataaaccatttatcaatcttcgtgatgtaatgtatctcctcataccccatccctctgcggatggcttccgcgatcttccagatgcggcggtcgtctacgacggccagttcctcttgcagttcctcatccgtcagttgggtgaaatcataagacatcaggctgtccacatgctgttccagcgaacggatggctttcatcagcgccccctcaaagttatcgcagatgctcatcacttcccctgtcgccttcatctgcgtagagagcgtacgcttcgcgcttataaacttatcaaaaggaagccttggaatctttaccacgcagtagtccagcatgggctcaaaacttgcatacgtcttccgggtcaccgcgtttcgtatctcatctagcgtatagcccaaggcaatcttggccgcaaccttggcaatgggatagccggtggccttggatgccagggccgaagaacggctgacacgcggatttacctcgatcacgcagtattcaaatgtctccgggtggagggcatactgcacgttgcatcccccggtaatgttcagttcgctgataatattcagcgcagacgtacgcagcatctggtattccttgtcacctagcgtctgcgaaggcgctactacgatgctgtctcccgtgtgcacgcctaccggatccaaattctccatattgcacacagtgatgcagttgccgtttccatcccgcatcacttcatactcgatctctttccatccagcaatgcaccgctcgactaagacttgccccacacgggacagacgaaggccattttccaggatttccaccagctgcaccctgtctcctgctataccgccgccgctgccgcccagcgtataggccggacgcaggaccaccggatagccgatcttctccgcgaactcgatgccttcctccacagattccaccaccagggatgccgcgcagggttccccgatcttctccatggtagtcttgaattccagacggtcttccgccttcttgatagtctcggaggtggttccgatcaggcgcacattattgcgccttaagaagccattttcctccagttccatggccagattcaaggcagcctgccctcccagggtaggaagcacgctgtccggcttctcctttaagaccagctgctcaactacttctaccgtcaaaggctcgatatatacccgatccgcaatgtccttgtccgtcatgatggtagcagggttcgaattcagaagcactacttccagcccttcctcctttaaggaacggcaggcctgtgtgccggcatagtcaaattccgcggcctggccgataatgatcgggccggagccgattaccaatactttctttatctctttatttctaggcattatctcgctcctttcatcatatccatgaaccggtcaaacagatagccggaatcctgcggtcccgggcacgcctccgggtggaactgcacggtgaagatattcttcccctcataggaaagcccctcattcgtgccatcattcacatttataaaagcctctttagcaatggatggatccatggtggacgcatccaccgcatatccgtgattctgggacgagatatacactctgttgctgctcagatccttgaccggatggtttcctccccgatggccatattttaatttgtatgtctttgcgccatttgcaagagccatcagctgatgccccagacaaatagcaaatattggaatgtctgaattgtataatttcttgatttcctgaataatagatacgcaggtctttgggtctccgggtccgttggacagcatgattccgtccggatctgcttttatgatatcttcggcggaagtatgggccggatataccgtcaccttgcatcctcgccggcttaaagatcgggcaatgttattctttgctccaaagtccatcagagcgacttttggtccattgccttctaaaacgaatggttcattgcatgagacttccgatacgacgtcgccaactatgtaggccttcagcctggttatcacttcatcgatgtcatagtcctcattggttgtaatcattccgttcatcgtgccctttacccttaggagcttagtcagcgcccgggtatcaatccctgcgataccgggaatgtcctgattttccagaaactcctggatcgtaccctgcgagcggaaattgctcggcattcgagatagttcccttacaatgtagccatcgggccacgccttcttcgattccatgtccggcgtaatgccataattcccaatcagcggataggtcattgtcactgcctgtccggcataagaagggtcggtcaacacctcaagatatccggtcattgaagtattaaacacaatctcgctaatcatatccctcgtggaaccaatgctggttccggtaaagacggtcccatcttctagtattagaaatgctttcatatatccaccctttccattccttttgttgctattgcgggctccttgcctgtatccaggagcctgaggctgccgctttcgtaaaaaaggcagtttgtgcgagcacacaactgccttttcctgtaccattttatcatcgacaatccttgtcttcacaaattgttaaaattatactacaaaaagtatgaattttcaacataatttttattcgtactgccagaatatcgtaatcttattcaattccggctcatccatgtattgatatttcacctcctgaagcccataccagtctgccagattctgggcagctcttcgcactacgtcctgcaggatggagtcatgggcctggccgtacaatccgttatcggcaaacttaaagaccaccggattggacttggatgatatgacttcattcattttctgaagcgcccctttgctgtcataagattcataatacatgccattgacaacataatagttttccgccatagactgacaggccggcagcgctacatcctgatccggcgtatgggtcttgaacagttccccatcattgcagcacatatagtcatagctgatcatctgcttctgattcacctcttccccttctgtcgcctggaatacgggatctccccacgtagtgtccacataatagtaattgccgctgcatctgaccagattccatgcatggctctggccgtccaaggtagttcctgtcacataagtgcagaacactcccagcctttccagcagatactgggtagccttggaatatcccgcgcatacggaatggcggttgacaaatacgctgtatatgttctgattgtctgctgcctcaaggtcataatccaccgtgtttacaatatattcgtagacatataggatcttctggtaatctgtatcttttgcaggcatggctgccagacattcattcaccgaagcttcgatcttttccttcattgcctccttctgtccggcatcatacaggtagaccggcttaagaaccgtataatcctcgcttccctcataggaagtcgaagtagtcatcccatcgcaccagaatatctccgggaaatctttcagtacgtattgaaacagcatatttgtcctgtccgcatcggatgcatggacatagatctcctctacattctccttcaccccctggacaatctctttatacgcctgcttctctccatcttccaattgctggtaataatacttctgactcagctcgtcatccgatatacccacttcctgatagggaatgctcccgttctgcttcaggcccttctcaattcctttccgcacatccttgccgatgcaggcagcgcaggcggccacgagaaagagacaaagaactgccattcctctcgttacgatatgtagatacccctttttcttccttcttcccatatatgctccttatatcctctttattgccttcctgcatccgtctttccaatgtatccgccaattcatttaaaacattatattcgcttttgcctgattgtacaatagagtaactttttctcccttatttcatatgataacagtaatagagtctctatgaggtacttatatgaatatcgtaaatccaacccagccagacactccagataaagggcggctgcagattaatattacatctgatatcaccgccagtcccgtggccggcgctaccgtctctatctcctataccggagtccctgacagccagctggaacagctgaccaccgactcttccggacagacagagacgatcgaacttgctgctccgcctttggattacagtctgaaccccgagatcgaggaacagccctattccgaatacacacttcagatagaggctccgggatatgagcctgtcagcattgccggcgccgagatacttcctacggtaaccgccgtgcagaacctgactctgaagcccatggactcgcctcagccctctgaacggatattcgtcatacctgcacatacattatatggaacttaccctcctaaaatacccgaagacgagataaagccagtaaccgagaccggcgagatcgtcctgagccgcgttgtcgtgccagagtttatcgtcgtccatgacggaagtccccgggacaccactgccagcaactattatgtcagatacaaagactatatcaaaaatgtagcctccagcgagatctatgccacctggccgaccaacaccattcgcgctaatattctggcgatcatgtccttcaccctgaatcgggtctatacggaatggtatcgcaatcagggctatgatttcaccataacctcctccaccgcgtttgaccacaagtggattccggagcgcaacatcttcgacaccatatccggcattgtagacgaactatttgcggactatctctcccgtcccaatgtgcgtcagccaatcctcacccagtactgcgacggcaggcaggtgcagtgtcccaactggatgacgcagtggggttcgaaggctctgggcgatcagggttattctgccattgaaatcctacgctactattatggggacgatatgtacatcaatacggcggaagctatctccggcattccatcgtcctggcccggctatacgctggaaatcggatcttccggcagcaaggtgcggcagatgcaggagcaacttaatgtaatcgccggctcctatcctgcccttcccaaaatcaatgccgatggcatctacggtcccgcgactgctgcttccgtggaaaagttccaatccatattcggcctgccccagaccggaaccgtggattacaggacctggtacaaaatatccgaggtctatgtgggcgtatcccgcattgccgaactacagtaagccatataaaagaagccggatgccggaaaagacagaaagtcttacctcactgtcttttccggcatccggcttcttattgattccatcagaagaagactcttctgatatcattgtacatgacgaacaccatcagcaccatcaggagggcgatccctaccagatgcacgtatccttccttctccggaggaatacgtttgcggcgcacggcttctacaaacaggaagacaagccttcctccgtccagagccggcaacggcagaagattcataacccccaagttggctgacagaagaatcgcgatattcaggagctggacgctcactgcgaatcctccataagatttgcttgccttgtaggtatcatctaccacatctacaattcctaccgggcctgagagctggttgagtccgatcttcccggtcagaagcatcttcaggctctcaagcgtcgtacatatccagtactttacctcataggtgccatattgcaatgcgcttagaagccccgctttggtatagccgctggaggatatgccgaaccggtaatagttcagttcctcatccatcttcggcgtcaaggtcgctgtctttgtctctccatcctggataaatgttatcttcgtcttctctccttgatggaactggttataagtattgatctcccggaatacattgatcttcttatctcccatccttacgatgatgtccccttctttgatccctgcctccgctgcgggatatccctgctctacctcgccgatcaccggcttgtcatatccgatcattccggtcagtataacggcaaataccagggccagtatgaagttaaagatgggtcctgccgctatgacagagatccttgcccagacagatttattgttgaagctgttcggagagtctgttgcctcctcatcttctcccatcgcgcagaatcccccgatcggcagtatcctgacagcgtatttcgtccctttgtattcccgggaatacagcagcggccccataccgatcgcgaattcctcaacgtctatcccattcttcttcgcaagtacaaaatgccccagttcgtgaaaaaacacgatgaagctaaagatcaatattgctaatataatacccaagttgtaaactacctcctgctgttaattctttcataagttgccgcttccgtatccaaaatctgctgaagggtcggattctctatgtttttatgggcctgcatacagtcctcgatgatttccattatctccagatactttatctgacggttcaaaaactggctgactgccaattcatttgcagcattaaataccgtaggcagcgttccaccggcccttccggcctcgtaggcaagagccagcccataaaaggtacgcatatcaggcttctcaaattccagtctcccaaggctatagaaatcaagcctctcgcctggaagatatcgccggtgtggatagtagagcgcatattggattggaagcttcatatccggcgtcccaagttctgccatgatcgcgccatctacatactcaaccatagaatggatgatgctctggggctgcacgattacctgtacctgatccacatccacctgaaacagccactttgcctcaatgacttccagtcctttattcaccatggtagaggaatctatagtaatcttctgccccatggaccagttgggatgcttcaaagcatcctccaccttgatatccagcagttcctcttccgtccttcctctgaaaggccctccggaagctgtcagaaggatcttgtgtatggccttgtgctcatttccctgcaaggactggaagatcgcgctgtgctcgctgtccaccggaaggatggatacgttcttttcggcggccagcggcatgataatatgtcctgccgtaaccagcgtctccttgttggcaagcgcaatatcttttcccgccttgatcgcctcaatggtaggacggatgcctatcatccccactatggctgtcactagtatctccgtatccttaaggattgatacttcaatcagtccatccatcccggatacgactttcgtatccgtatcggcaatacgcgtccgcagttctatggctttctcctcggaccatacggctgccagtcttggatggaattgtctgatctgctcctccagaagagtgatgttgcttcctgccgccagccctaggacttcaatatccccattttccctgaccacctcaagcgtttgggttcctatggagccggtggatcctaatatggctattcttttcataaattacctctcttagatattatatggcaatactttctctgtcagtatcaaatattcccggcaagcagcgccgccagataatagattacaggcgccgtaaatataacgctgtcaaaccggtcaaggattcctccgtggccagggatcagcttgccataatctttaatgtcgtggttgcgcttaattgcagaagccgccagatcgcccacttgggatatcatgcctcctgcggcgcagatgatcgcatagtgaagcggattggcctgcgcgcctccccattggttcatagcaagcgcgaacaatacgcccaaaagagcagcgcccgccaccccgccgattccgccctccaccgatttcttgggactcagtctcggcgccatcttgtgcttgccaatcagcattcccacgcagtaagcacaggtatcgcatccccaggaactcaggaagatcagccatacgactacgcctccgtcagccagcatcctggtctggtacacgaaggaaagcatgaccgccacatagaaaaatccaaagaacacagtcatgacctgctctgcccggtacgcgggaaaggtaaatacatagaccgccatcaccaggatcaggaacaggatggagagcatcatcacatattccatattccctgtaagcagcatcccataataaacgactgccgccaaatatcctgcagctcccagcgctttcgtctgcacttctacaaccttgtataactccgtaagcccgatcaggctgatgattcccagaaaggcaaacagcagattgcctccatagccgaccgtaacgatcagtacgattaccagtacgatgccgcttaacagccttgtcttaaacatcttctttctgttcctcctttactcctccatatcgccggtccctggcattataatgctcgatcgcctttgccagttcttccttcgtaaaatccggccacggaacatcggtaaaatagaattccgtatatgccaactgccacagcagataattggatagcctcagttccccgctggtgcgtatcagcagatccggatcggggatatcatgggtatccagataactttcgaaaactgcctcatcaatctgtcccggagcaagccttccttccacgcagtctcccgccagtcttctgacggcccttaaaatctcatccctgcttccatagttgatggctatctggaaattaagcccgccattgtccttagtagcctcggtaagttcctggatcctagtgcggatatcctcatccaggcggctgatgtccccaatcacccgtactttcatatcatttttcgcagcggtcttaaggcaggtcttcatataatttctgagaagtttcataagcgcgtccacttcatcctgcggacggctccagttctccgtggaaaacgcatataccgtaaggtactttactcccatccggtatgcatcctcgcagatgcgctccacattcttgcttccctgggcgtggccataattgcggggcattccctttgacttggcccagcgtccatttccatctaatataatcgcaacatgctgcggtatattcatttggctgatctccttccatgaatggggggacaggccccagtgtactttgggcctgtccccatcctcattaaaccgtcattacttctttggatttggcctccactgcctcgtctacttttttgacaaacttatccgttactttctggagttcctcttccatatccttgatctcatcctcggacacttctgatcctttcaacttcttcaacgcatcgttgccgtcacggcgaatattgcggattgccactttggcgccttcgcccttcttcttaacatcctttaccagttcttttcttcgttcttccgtcagttccgggaacacgagccggatggctgatccatcgttggtcggattgatgcccagttcggaagtctggatagccttctcgattgcctttaccatcgatttctcccatggctggataagaatcatgcgcggctccggcacagatacgttgcccacctgctggatcggagtcggagtcccgtaataatctaccataatcttattcaatacattgggattggcgcgtccagcacggattgttgcaaggtcgctttcaaggcttgccatcgtcttcttcatcttgtcttcatatacctgtagtctctcattcataaatacttctcctctcttattatgatacagttactttcgttcctgtaaatgttcctgtcatcgtctctacaatactgttctcttcgttcagtccgaatacaagcataggcatcttgttctccaggcacatgatggatgccgtaagatcaaccgccatcagtttcttatctatgatctcctggatcgatatctcgtcatatttcttcgcctgcggatttaccttcggatcgctgtcatagattccatcgatggctttcgcaagcagcatcgcatccgcctcgatctcaatagcgcggagcaccgctcctgtatcggtagaaaaataaggatgcccggtccctcctgcaaaaaagatgacctttcctttattcaaagcctccaaagccgcatctttcgagaacaaggtggtaaacgcgccacatacgaaaggcgtaaatacctctgtcttcatccccgcatatcgaaaaatatcggatacatagatgcagttcatgactgtggcaagcatacctatctgatctgcctttacacggtcaatggtctcgctggtacgccctctccagaagtttcctcctcctgttacgatcgctacctggattccatcatccaccagttgcttcacttgtctggcgactcccatgcaggtggcctcgtcaaatccggtcttcttctcccccgcgagagcttctccgctgagtttcaatagtactcttttcataagtttaagctccttacttctgttatctttatgccttcgcatacttacagtaaagtatagcataggaatttgaaaaagggaatatgctactttagcattccctttaatttatactgcttcataatctgggcatatatccagattagaagagttccagccaggacccaggcggccgggcttgccaggcagatgcctgtatagctgccaaaatgggaggctgcaagggccgccccgcttctccctattagttccgcaatgcccgcagtcatcggaagaaggccgaatcccatcccctgtatcccattccgatacagattgacgacggacagcgggataaaggagatgccaacgcactttagatagatatccacatattccatgatcctgtccacgttatgggatacaaacagcgccgtcatatatttcccaaagaagaagattaagatacccgtggccacggcataagcggcgcccatccaggcagcgcttcgaaatcccttgcgtatccggtcgttccggcctgcccctacgttctgggcacagtaggtcgccatggcggttccaagggccacataagcctgggtaaccacctgctcgatcttgctggcagccgagaatccggcaacagctaccgagcccagcatattcagggcggattggaccacgatggttccgattgccgttatggagaactggaaagccataggaaatccaatcttcatctgccactttgcaagatcccaattcatcttccagtcttcttttccaagatgcaattcgggaatcttccgcataatgtagaacaggcacagaagcccggatacgccctgggatatgacggtcgcgtatgccgctccggccgcccccatcccaaactttataatgaacaacagatccagcacgatgttcaaaaacgctgccaggattaggaaatacaaagggcgccggctgtctccaagggcccttaggatgctggccagaaggttatataacgtctgagcggcaattcctccgcagatgaccataatatacccatatgcctggtcatacatatccgctggcgtatgcatccagcgcaggatatccttcatcattgccatactgagaatggtaagaatcagggataccgccgcggacagaatcgcccccgatgccacggactggcgcatggcctgcagattccccgccccatagtgctgcgccgttatcaccgtaaatccggctgtaaggccaagcaggaacccgatgatcagaaacatcagcgtcccgcatgcgcccacggctgccagagcctcattccccacgaatttccctacaatcaccgtatctgccatgctgtagagctgctggaatatatttccgataaaaataggaatcgtaaaattcagtatcattttccccggctttcccgctgtcatttccttgttcatctctctgcctcctgcctgaacgtgtaaaagaatccggatttataccggctttctgtttcttattatttgctatttatcatatccaggatgacctctgcgatctttgatgcgtccgcattttcctcaggacaactgcagacgtatttgggatacccgctgtttttaaacccttctaacaatataacatccgcgtcaggaaaggcctttatcaactctttcacgctgatcttttctttggcatccctttcaatcctccatctgcggcctgagaatatagccgtacccaaggctcctgcctttctatgccgatacgtatccgtacctggaacatccggctcaaagtcatgggcatcatgcttaatagtcgccactttatatccatatcccgtgagaatagggattagattttcgatcattgtcgttttcccggaattcttatatccgctaattgcaaatatcagctgcctatcgtcttttacagaatcctcacgcatacttcctcgcctctcttaagtcccggacttcctgccgggatgtcaatcatacagttacagtcttttaaggtgcttaagacccccgaagaagcaaggccctttgaaagcctgacctcctctcccgttaatactgcccgcaggaatcttcgcatcttgctgggttttggaaaatcttctgacattacagcactttcttccttcgccagaaatcctgcatctccagttagataagacaaggccggccggaccagaagttccatccctgcccctgccccaaaagggtttcctgacagacacagcacgcaggtgctgtcatacatgaatgccatagccggagtgcccggcttaaagcggatcctccagaacagtttccggcagcccagattctccgccacgtcgtgcatgatgtctttctttcccaccgatactccgccggacgtaataataagatcatggttttctgccagttccttgatgcaggctgcgactttggccggagcatccggcgcctttctggtggtcatctgtgcgattcccaattccataagccgcccggcaagaaggaattgattggatgtatagatctggcctgcctccagatcctcccccggcatccgaagttcgtctccggtggctatgatcgcaatcctcggctcgcgaaacacggctacgctgtcgtaccccatgctggcagcaagggcggtattagccgcattcatccgctcgcctttatgcaccaggcaggcgccggcctggtaatcttctccctggaagcaatagttatcatatggatttacctgtttaaagatatgtaccatttcttctccataatccgtatcttcctggcggatcactgcatccgccccttccggaataggggctccggtcataatccgcactgcttctttcggccctatccttcgcggcgaatagcttccggcaagaatctcgtctacaacattcagttctgcggaattctctggcgacgcgcctttggaatcttctgagcgcagcgcatatccatccagaggggatcttgcaaaaggcggctgatcgatgggggaatacaagtcctgcgccgtccggcgcccaactgcctctatcaatccaaccacctgggtgtccgtgatccttgtaatgtgctgttctaatatctttagagcctcctccagagagatattaatcttcgcgccggtaagaaggctataatcctcctcagaattaatgttggcgatcttccagccatgatcctccacaggcaccttctcgtaaggaatccttaacgtctcccataccttccttatacggtaatccttcgcttcttccatctgctttaatgtcggccacattttcttcgtatagattcccggaaatgacaggatccttccttttacgcatggaattaccggacggcccgtcttcctatattgctccgccatccacaaagccatgtcgcccggaaaaggaatcatgtcgcagggcactaccagcaaagcatccgcgccgcatttttccaagccgcttaagattccgcccaagggacccatgtctgcatattggtcaatgacaagatctgcatccaacgcctcataaggggccgcctgttccaccgacaggtagacattcatgaaagcaggcatgcgttccttgatgtgggcatagaatgtctggttctggtaggtaagcaaagcttttttcctgcctgacatccttcggttatcgccgcctgccaatatatatcctgcaatctctttctccatgatatgatccttcatctttattactgccattgtatggccttcacatggcacgctcttacacatgcaggctctctgccttccttaagccgatcaatgcatccgtcgcatttttccatcttaccatccgcatcgaagcgaatggcgtcattcgggcagactgcctggcacttcctgcacttcctgcacttgtccttatccgtcaatatcagcccatactgctcatctttgtatattgccccaaacgggcaggcctccaagcattttccgcagtgggtgcatccgtcgcagacatttttctgcatctttgcatccttagacagcgtctttttgatgctgcgaaaactatacgcattctctgcctcgggagggttatgttcggctatgcaagcaacatagcaggcatagcacccgatacaaatatcttcattaaactttatcatactggcccccttcctccttcactgcctctatcctgcaaaaatatcctttaaatcccggaaatcctgatatcggatccagataatcctttccaatcagttcattggcgtcccctttggaacttccatgatagatataaacaatgcccggctgcccggctatatcgtaggccgcaattccctcggcctccccagccggagtaatcagccttaccggactgccatctgcaatgccgtagcgtttgccgtcttccggatggatctctgccagcggctccttctctatacctgccagccatggcatacgatatagcctggcatggaaaaactgcggcttccggctgcccgtattgaggataagcggatattcctctctgtcaatgctggtttctgtgcgatagtcatggtaaaccggcaagccttcatagccatggcttgccttgtatttctcaagtaccagggattttaactctacttttccagagggtgtgtgaaaaggctgcgtttcataagtcttttctgccggaggaatcagattcttcccttgcatgccctccggatggctttttaattcttccagagtaatccccgcaggctttaggatatactccatgtaagaatcatatccttgtaaaagcacttcgtccttaaggcccatcttcttcattactcccatgataatctcaatatcgttctttgattcacccaacggccgaatcgcctgattggagaagaagaatcttccgcctcttaaagcatgcacctcttccctttcataggaagtgcatgccggaagtaccagatccgccatcttgcttgattcggacatgaataattccacatttacatagaagtccagcttcccgagcgcttcattccgcctctgcggctgcggccacatgcggtggttcagtcccatggcaaacaccgccttaatctggtaagcctcctcctcaagtatgtagtctgccagcctgatgcactgcgcttcgtcgcaggacaggtcaaaccaggccgggaattccttctgtccgatggcttcttcctgatcatagcgccggactttcccaaactcatttaccgggcatgaaggggcgggacgctgccgattgcccccttttacatcgtagtttccggtaatggcgatcagagagaatacggcccggtaattctgcactccgttcatatgatggaccaccggagatgccgagaacatgattccggccgggccttcaccggcgtaggtcctggccgccagacgtatcatgtctttcgggactcctgttatcttctccgccttctcaggcgtaaaatcctgtacatagtctttatattcttcgaagccgtagacatactgctctacaaactttttgtcatacagatcttcctctataatcacctgcgccatagacagagccagcgccccatccgtgcctggaatcagctgcagatgaaggtctgcgtcgtgggcagtcaccgtatgcctcggatccacatcgatcaccttgatgcccctctttttcaggcttttatacatgccgctcatgggcgtattggaatgataaaggttggaactccatagcatcagcgtcttgacattgggcatatccggcccgcagattccattgccatatatggagcgccaggcaagcgccgcagcctggaagcatgtgctggactcggtacagaagttcggcgacccgtaggcattggccatccgcagcagcgccggacggaaccacttgggatagcctgcatagaatacggtagatctggctccataagactcgcggattcgaagcaggttctctgcgatcatctcataggcctcatcccaggagatccgctcaaatttcccctctcccttttcccctgcccgtctcatagggtagagaatcctttctttgttatagacatactgaagcgctgccgcccctttcgcgcacaggcctcctgactgggccggcgtatttctggcgccttccacgcctgccagtttcccgtcttctacataggcgtctacttcgcagcacgggccgcagatggagcaggttgtttttacgatccttgtcttgctcattttcttacacatccttccggctggtatctgccaatctcgcggtttatcctgtttctcaaagtaatcaggtacatctctgatttgggataggtgcaaaaagtaaggggttcaaatagttctccctcgatcagttccatcacatgctccttgctggtcagggattctaataattccaacgccctcagatccgccattgcctcatcatgcaccatcatccggatagactcctccggatgcccatccgccccggggtacaccaggaatggatctcccgcagggaacgcgttgcctgcatccgtcacttcatagggattgatgtgctcgatggaaaattgactgttatagaagttgtatccccagtgcaggattccgacaatatcgtacttatacaattgaaccccatatatacggtttcttgcagatggcatggacataaaccggttgcttacttcatagtactgtccggtgcaataataggtccacatgtccgtaagcccatgctccaggaattcctcaatctcattattgccgggtatgggcttttcaaccaggccgtgacggtagaattcataactcgacaatgcgtcaaacgtctggaatccacccagcatatctcccagggattccctggctgcccggtaggtcttaagatcttcttcccttggctcgtctgagatatggaaatatgtgacgtccgcaatctcccattccctcaatttctcaatcagctgcggaaggaagcattggaggaatctggtatattctcccaccgcaggcgtatgccacccgaatatcttctcttccttcccgtcacgcattgccacgacttttggcgcgtactttgctccccactgggagaacagatgggacatctcaaaatacttaatcttgcatttcttgcacaggtccacccaccgcttgagcttatcaaagccaaacaggtattccccgtccttcacttccacatcgatcagctgggtcgtggtcctttccagtcctatcgccgtatccagaggagaggtaaacaggggcgtaagcatcatattacagcctcttttcacatactggcggaaataattctcaagtatctcccagtgttcttccgaaaatacgtcaacctggtaataatctgccaggcaatctgcatgcatccattcggtatgtatgatcttctgctgtggcaggctggcgccaattatggtaatcttcattacgcaggagcatactacacggccctctttttgcaggctgatttcgatcgtatactcaccgggagcaatctcttctgttacctccacgtcaatccacaggcttcgccattggttggagcacacgattgcttttccgtcctttaagtctcttaatagatccggatacagtcccgaggttgtctttaggtaattgtcgtctacaattccattggtggcccgtcccacaggaacctgttctacgctccttacccttatccatttctccagcggtgatgtaatcttcacgtccaggcgttcccgcataaaaaagtccccggtatacgcagcctgaaaggataccgtctctccccacagcgcgcttagaagcaggcattccggcctgtatatgggcgtctcgtccggaaataccttcgcaagcgaacttagcagtttcatttcataatgtatctctgtatttttcttcattctgatttacctctcatttactaatcgcacgtgctttattttatgccgctcatggtcattcccttgataaactgtctttggaacaagacgaatataagaatcatcggcatcatgatcatggcagccgcggccatggtcgccgccagatccaccgaacgctggctgtcaaacatcaccaggccaagcggaagcgtcatcttatcgatatcgttgagcatcagaagcggattcagataatcattccagtttgccatggcggtaaagattccaattgagccgatcgctggcttgatattcggcaggatcacgctccaatagattctaagcggccctgctccgtccatcttagccgcctcgcacaggctgtccggcacatccgtgataaactgcctggccagatagatggcaaacgcgcttaccagcccgggcacgatcagcgcccatctcgtattgaacagatgcatcttctggatcatcaggtatcttggtatcatcgtcacctggggcggaaccatcattgtcgccagcattagaagaaacagggatcttttaaacttaaactcgtattttgcaaacacatatccaatcaatgtactggtaaggattacggcaaaggtaatcacagctgttatcacgatgctgttgacaagccagtctccaatcggcgccttttcaaaagcgctgcggtagccttccacagtccactctgccggaaagaatttctccttattcttatgaatgtccgcattgcttttaaaggaagtcaccagcatccatgccatggggtacatcataatcacggaaaacacgctcataaatgcaataatcaagtaatgataccttttatacacgttctttcttctcttcatcattcataactccaatctgaacgcatcatcttattctgtaccagggcgactaggaatacgatcaggaataacgcggttgcgatcgcagaggcatatcccatgtcaaaacttaagaaactggtcttaaagatatagttcgtaagcaccattgcagaattatcgatcccacccttggctgcaaatatgcggaactgcgcaaacatctggaaatagttggccattgtcataatggtcacaaacgcaaacgtacgccccatcagaggcagcttgattgagataaatctgcggattgggcctgcgccgtctatggcagccgcctcatcgaactcctttggcacgctctcgattcctgcagtaaatagtaccacgttgtatccgatatccgcccacagcgtataaacgataatgatgatcatgagcggaagcgtagtcaaaagccagttcttcgggctccttccgaagaatgcaagaatttgattgatcgtacccccatccgttcctacgattccatacttccataccatagaggttcctaccatcggcgcgatacatgggataaataggatcgtccggaaaagagtctttaatcttttggatggaagcacggagatgattttcgcaagaaacagcgtgatcacaatatttccagccacggcagccacacagaaaaagacggtatttcgcaccgctttccagaacgtctcatcctggatcagccttttatagttctctatacccagaaacagattgtgcgtgctggcagggttatagtcatagaacgatattcccaggccatacgccaccggaaagactgcaaagataagcataaaaacgaatccgggaatcagtactgcagccacaaaacgattatttttcattggttcatttccttccgtcatatgaaaggggcagagaatccccccaaagaattccctgcctctcatgtattaatccatcgaatagcctatctggcattcctctgttatcttctcagacgcttcttttaacgctccttcgatatccggattgtcggactggcaaagcccgataaacatctggtcgaagatctcacgcatatcggaggtattataaggccccatccactgtccgctaggaagaatatccagcaggaacgctacattcggcattgcctccttatactcttcgctgtccagcaaggattttctcggcggaagctggttgcatgctatattatgctgtaccagattctccggctcgctgaagaacttgacaaattcccaggctgcgtctttgttctttccgttatccggaaccatgattccccatcctgtctcagatgcaaatgccatctgttcgccgtactgcggtaccggcacatattcgaaatcttctccatatgtcagatcataggaatctgttccctcgccgattgcccaggagccgacagaagacatgtagcccttatcctgatatacgtcgttgtagcaatattctccggcagtcaggttgtccagatcgcattcgccgtccttcaccatactcagaatctcttccattgccttgatgccttccggcgtagcaaaattaattgattcatcttcctgcagatactggcctccctgctgaaggatcattgcaagatagttacaaatcagcgcatccgtatcaatcatctcgaagcccttcatctctacaacctcgccattttgcttggctacttccttggataccttgcgaaggtcttcccaagtctttgggtatgagattcccgcatcatcaaatagtttcttattaacaatcattccgccatattccagattgaattccatcggaacgccataatacttgccttccttctgatagatgccaaccgttggcgccagataatcttcttctaattccttggaaaggtcctccggcacttcggacaaggcgtctgactggatgaatgaaggcgccaggcctccccataccgctatgatatcagggccggatgtactggaagtcaatgcggtctgaatcttgtcattgtagacttcgaaggggtactcctgcacctctaccttataatccggatttgctttctcgaacttcttgcccatctctttgtaagcctttacccatggagcattatcatggcaccagaatgtaagtaccgtcttcccatctccattcgaggcatcctttttgtcctcctttgatccgcatccggcggcaagagagccaaccatagcggcacataacaatacgcttaacagcttctttttcataagatttccctctcctatatattcttttgtctataagacattatatatgataccgcaaaatcgaacaaattgataatctatatattcttatagataacatctataactccaattccgatccctatatcttttccactcatcaaatactgttttgctgctcttctaagggaggtatcttccggatatctctccttatcttccagcacatccccgaatatcctctgctctgcctgcggataatcatagtgcaccttgacgacttcgaacatctcctgaaatcttatgatattgctgtctgatggcagcatttccctaagatgaggcgacatcagccaggattcacagatatatgcctcatatcctccttcaaagaatcgtgtggaccacgcaaaggattcttcgcattcctcatatttcaaaggaacccctgcaggaatatgcacattcaagacatgtgttcctgccgctatggttctatcctttccttgcaagaactcttttatgacaacaggctcaaactgaagtcttcccagtcgaaagagtttcatcttcacggactgacccagccaccaaagttcttccagcccatacacgccatgcttccgatagcattctttgcaccagattgtaatatcatagaaagtctggtcataaatgcactcttcaatccccttctcacgatatctgtcatgtacttcggccgcaagacggatgtataatcccagcgcccacgcatacttgtccggcagctgattccaatgcgcaaggaattcctccatatcttcatagaacaacatcctccatgcgtcaaactcattctgcgtcagttccatatgccgtacgatttttcttgccccttccggaagactgattctttgcattacttcttctatgcctatcatctgttctgactccactttcctcttgatctattctgtctatttcattccttatcattttgattccttatcatgttaacataaccatatggctattccgtggcgacaatcaccgggtcattgccaaactgcgccatgtccctgaccgcttaacccagatggacttcgatattcagcacttccatctgcctcctgcagcagtttcgcgcatttggcgaaaaccactacaaattcatggatttcctccaccgccatctctctggaaggtgatcgtaaaagaccggccaaatccggccgtcagctggacgaacaattttgcccctgttttgtgaaactcagggagccagaccttcagatcctcatacatcttcttgttcttataaagccattgcccgaacattagtcttacgtacgtagtgcataatattatgtacccttcacgactttttgtcaataggattcttgacgtttgcaactctatcttttataattactacaaaagtaagattaaaggagcataaagcatggaaaaattacctcaaatttcagaagctgaatatgaaatcatgaaaattgtatgggaggattctcctatcagtacgaatgatatctgtgcaaaagtaccttctgttcataactggagttccaaaacggttcataccttattatcccgtttagtctcaaaacatgtcatatcttatgaacaaagagggcgcatgtattactactttcctatcatctcgaaaagcaaatatttattacaggaaaatcgctcatttttaacgcgtttttataatggcgaggcagccccactattgtcatcactgctatcaaacgcacagttatctgatcaagatttaagaaatatgtaccatttgcttgattcaaaattgaatggtggtgattaaatctgatgtttgcaatacattttctattgtgtaatcttgtaattactattttgctgggattgatcctattagtgaaaaagattttaaaaaagcatcttactataagcagccaatatcatctatggtatatttttgtctgtgcagcgataattccctttatacctcttaaaagcattactcctgcttcgctgctgcaaaggatacaatatttattctacccagaggctgctaatacgcttggaagctctatgaaaccgttagacaatgcggctttgcctactcagttgggtatatctgattttgcagcatcatatggcagttctgccctgaatcagttaaacagcatcttcattcctatatggatcatcggctgtttgataaccatattatattttgcatataacattataaaaatttattccatcagaaagtctgcgtatttaatatcgaaagaaaatgaacccgatttgtataggcaatattccgaatgcctgaatgaacttcgtatcaaacgcaaggtttctctctatgcttcctgcaatatatccagtccggtatcctacggtctgctccatccaaaggttattattccgcaagacatggacatacttttgtcgaatgaagatgtacggtttattttcttgcacgaactgctgcattataggcataaagatgctgcattgaattacataacctgtatcctgcaagttatttattggttcaatccttttatctggtatggattccgggaattacaaaaagatcgggaaattgcttgtgatagttccgtgattcatattgttggaaaaagccaatccacaaattatggctatacattaatcaagtatgcccagaggatgcagcacaacgcctttctttcccctctatcacgtttaggcggagaaaagaaagtaatgattcagcggataaaggaaattgccaactacaaaactaatactccaaaacaaagacggaaaagcgccgcattattactattgatttgcacaattgtctattgcataagccctttgctgaccgtttacgctgcgcatgatgtctcctatgattttcaatctcaaaatgtagaaactatggatctgtcctcctatttcaaaggaacggacggaacattcatcttatatgatacatctagcggtcaatatcaaatatacaatcaggaattaagcaccaaacgtatctctcctgattctacgtttaaaatatatagcggactctttgcattggaagaaggcatcatccattacgatgcttccaatcgagaatgggacggaactacttattcttttgatacatggaataaagatcaaacccttgcaactgccatgcaaaattccgtaaactggtattttcaaaacctggatatacagttaggatatcagaaactctattcctattataagaaaatttcttatggaaactgcgatctgactgctgatattaactattattgggcagaatcttccttaaagatatccccagtagaacaagtgatgcttttatcaaatctgctgaaaaacaaatggaattttaaagaagagaatatacaggcaataaaaaattctttatttatttctaatatctccatcggaagattatatggaaaaaccggtacaggagttgttaacgggcaaaattcaaatgggtggtttatcggctttattgaacacggcgaacgagtttactgctttgcgacaaacttgcagaatgctgataatgctaccggcagcactgcctccgaaataaccatagagatactaaattctatcttttcttaaataacagacataaaggggatgtcggttaataccgatttttaaactctaaatcctaaaataagaatctcccataaaaatcagtgtttttcatacttgatattctgtgggagattcttattgttctttttctgtatatattttagggcgcaaaacacccataactgcatttttgaacatgcacattttttaagccgtcttttcctcggtttttccttcgaattttttaatctcttcatgaagaaaacgatgatatttattcatgttccgaccaatggcatacagcatgaattctttatacaccttctctgacgttcggtagttgaatcttcggaaactatcatttcccttgatatctccaaaatgtccttctgtctggatggaacggatctgacgatttagaatccctttctcactttggatgtttgcatgggattcctctttcaatgtttcccattgttcattgatcttcataactttgtttttctcagcatctttttctgcgttatatttatataagcatttcgctttgtgttcacaaccactacagtctgcacatccgtatacctcaaaagtctgggtataacccggctgttttttggtctctgtgcggatatgatgcaatcctcttccgtcatgacaaacataataccgttcatcctcaaatatctgtgttttcatgttgtaatattttccaatatcttctctgtaagcgcgtgttttccgtttttcatgatcctgcagcttgatgtaactggatatcttatttttctttaaatacagaagatttttctcgctacaataaccgctatctgcggttacttcttccaaaatctccccaaatgcatttttatgcttttctaaaaccggaatcagtgtgttatagtctgtccggtcattgcttacataagcatggacaatgaaataattctctactgcgatctgaacattatatgcggcttttaactgtccgttcagcatgtgatcttctttcattctcataaaggtggcttctaaatctgttttggaatagctgttcctgtcctttcccatgatctcaaaacattctttgtatcccataaggcgtttgccgcaggtttctaattcctcataaagctgctggagctccgatttcctcttcccttttccgtaaacaaacgcaatctgttccttctctgcgatctgagtcagatttttctgaagtttcaaaatctccaatggggaacagttgtcaatctcgatgatcgtattattggacaactttttatgttttgtcagttttcgcttccggttcttttcaatgacatctcttaccttatccattccttcgatcacaaacatatgtgcatggggaatgtcatattttatgccatactcattttcatctatccatgcattatacttctgatacagtgaatcaatcatatcgagtaagcctgcgagatgataattgatcgtccctctccacacaaatgtatagcggtttgcattggcctctatttttgttccatcaataaaaagggatttcaatgtgatcagtccttctttttgcaggcggcggagaaactggtaattcaactcatccaatacatctgcagtcagtcttttattcttgaactcataaaaagcatccctttttggtttctgacctttggtaagccagataaatgcaaggtctctttcgcataattccacaatacggtcaacagctctaatcccacgcatgtttgcgtaagtaactacggcatacatcataattgggttatacccggttcttcccttatctgaacaattggccaacaagccagaaaaatctaattcctccatcacttttttcagggtatagactggatcgtcgtcaggtaaacacaattcgaagaaactgaagttaattttctgttgccctaattcaaaaaattcgttataatacttattgtttagcatagttacattataacatgtaacggagaagagatggttgtcgttagccatctttttctcttttatggaaaaatttcaggggcagatgtgacctggtatgagtcacatctgcccctatttggaactatctatttcccgatagccccttgatttatctttcttataagttctatcttcctagcctctccttcagcatcttatagatccggtcaaactcccgctgcatcccgtctcctttggcagcggatatgatctcatggcgtttcccctgccagtctgtaaggaagagcaccttttttacctctccctggatccctacctccaccttttccatatctgcaaaagcgtagataaatatgtcatctttataaaccagaatataatctctggcgatgataacatggcagtccgaaaattctgccacgtcgggagcgataagctggcggaagaactcttctttatcctcgatctgatccagtttgcctttcaactcgctcctggcttttatattcgtcattgcaagaaacgctccgcccactgccagaataaccgtaattacaatattggaaaacaggcagataaaggccactgccagaaggctgccccagacaatcatgcccgtctgcagcctcttggccctctcctgaataaaatcatagtatttctgctcgcctgccgtctgaattctcatcgtagcacccctcttttctgcctgcctagcgaattcgttccgggaagccgatcttcttgtggactttccgcagggtcttattagcgaagtctcctgctttttccgcattctccttaataattccgtcaatatacgccttgtctttctcaagccttgccacttcgtcctgcagaggcttcagcacagacactactgcctctcctaccgccatcttgaagtctccatatccttttccatcgaactctttttctacttcttctgccttcttgccggtacatgcgctgtagatatcaatcagattcttgattcccggctgcgtatcccggtatagaacctgggcctcggaatccgtcacggcgcgtttgcacttgcgcatgatggtatccggatcatccatcatatagatgctggcattgggattctcgtcggacttggacatcttcttggatggttcctgaaggctcatgattttcgcgcctacttttccgatgtatgcttccggtacggtgaatacatccccataaatattattaaaccgttcagcaatgtctcttgtgatctcaagatgctgcatctgatccactcctaccggcaccacatccgcctggtatagaagaatgtccgcggccataagcaccgggtaggtgaaaagcccggcgttgatattatccgcatgctttgccgacttatctttgaactgggtcatccggttcagttctcccatataggtaaagcagttcaggatccacgccaactctgcgtgggcggatacatgcgactggtagtagatgcagtttttctttggatcaagccctgccgctatatagagcgtaagaagcgctcttgccctctttctcaaagtggcgggatcctgtcttaccgtgatggaatgcatatctacaacactgtagaaacattcatattcatcactcagcgtaacccagttcttcagtgcccccaggtagttgccaagcgtcagattcccggttgcctgcatgccgctaaataatactttcttatcgttaatcatcttctcttcctccatgtcttttctattcttcccatggctctatctcatcgtcataataggccacattctctgatatgattcggggtatgccgtccgtcacttccacttccgtcacggcacagttcttgtggactcccacgccccagtacctggacaattcctcgccccggatattgttcagcaggccagccagcgctgctccatgagtcgtgattaatatgttgctcgactgatactgtcctctgccgcagatatcctttaggaactcgccggtacgctctctgacatctataaaatcttccccgccgcaaggggcttcatagtgcacaggatcatcaaagaacctccgaaacttctccggcaattcccagttgctctttgagcagcatttgccctcataatctccaaaggacatctcgataattctctgatcctccaaaataggcgtctttctgccttccagaatcagtctggccgtctcctttgccctgccaagcgggctggtatagcatacttcaaatggaatgcccgacagtccctttgccgtcttcctcgccaatgatcttccaaaatcattgagcggaatgtccacctggccttgaattctcctcttcttattccaatccgtctcgccatgcctgacaatatataacttcatcatatgcctccttaacgtaccttgttagtatatcataccttcgaatgtttttcatagtaaattcacgtcaaaaatgctataataacaacgaaaaagaaaaggagcgtgtagttatggaaaaaatcacaagttttacaatagaccaccttcgcctggttccaggcgtgtatgtatccaggatcgactatgtagaaggccatccggtgaccacctttgacctgcgcatgaccagccctaatgacgagccggtgatgaacaccgctgaagtccataccatagagcatctggcagccacatttcttcgcaaccatgaagagtatgcagacaggacgatctatttcggtcctatgggatgccggaccggattctatctgattctgtccggggagtatcagtcccaggacatcctgcctctcatgaaggaaatgtttgcattcatagcaggctatgaaggagatgttccaggtgccagcgccagagactgcggcaattatctggatatgaatcttccaatggcaaactatctggcccgcaagtatctgaatgaagtactggagagcatcaccgaaaaccaacttcattatcccgaataaaagaactgcggcgaagcaggccggatgtcaatcatccttgccgcgcttcgccgcaattttattatgcagcactgctcttatctcagtctttcgcctccattaggccgtggtcaataatatagcgcaccacatctttcacctgaaccatattcttaacgtcccgtatatcgatctccttatcgcatctggcctcaaacgcacagaccatgttagccagatccatggagttaaatgccagatcattgacaaattccgtgtccatggtaagattgtctatgcctgtgacttcgtagaccacctcccggaggacctccaatactttttcctccatctatcccgtcacctccctgcgttttttcttctgaatggatgtctttttaaattccgactctgtaagcttgactgactggatcctcttataatcaggaagccggttattcagttttgtaatttcctcctgaacctgttccagcagctggaaggtatcattcgtgtcagcccgttcctcatcaatgcagatgagcgcggacaaggtgacatcgtctatggcgtttccggccgatgccccatataccatgacttccttgaccaaaggaatctcctggatatatccttccagttcttccggcacaaccttcttgccattgctgaatacaatcaggttcttttttcttccgcagatatgaagatagccttttctgtccttgtagccgatatctcccgtatggaaccactcatcggtaaaactctcctctgtcagtagggaattcttataatattctttaaagacagatgggccttttaccagaatctctccgtcatccagccggatctgcgtctgcggaatcggaaatcccacagaagcggggttattctttttattcatattgctgcctatgagcgggctgcattctgtaattccatatccctggtagactccgacaccgtacgcctgcagttcttcggcaaccttgacgcttaactgggcgccaccgcaggggataaacttaaggttcggccctaccagctgctccagcgcctgctcctgatacggactgcatggaagatgcattttcttccttctcgtatacttttcaaccgcctgcatcgcctgttccctggtaccggcaatttcctggcgccggtgcacttctttcagaagattttccataatcatcggcactgcaaccagtgtatccggctcatagagccttagatccctcatcagcgtcttaagcccagtattcatgcagatatccgccccctgtgatatcccgtccagcactccgcacacgagggagtaagtatgatatagaggcagcggattgaacagccgctctcccaccttcaccagcgactgggtatggcaggcattgaacatcatgttgtactgagacagcaccaccggcttggatacgctggtggttcctgacgtatagacgatagccagcggatcgtctttttccacttgcgggcagaatgaaaagtctttccactgattcttctttttcagtttctccccttctttaagcaggtggtgataggaattttctgctccttcgccgcgcatgatgacatactgcatctggctttccttaaatacatcaaggaatgccgcatccacaaacacgcagcaggcatccgcaaattccgtcattgccagaatctcatccccggcctggtctatgtccactgcgatggctacgcccccaatgcagcctactgcgcaaaagacaaccacccattcataggaattctcccctacgatggccacgtgcttcttggccagtttcttcgtcaatagcgaaccggccaatgcccgcacgtctgctacgaattcctcgaacttcacactgtgcgcctgtccttttaagtcataggtggtgattacgctttttccacggtgcctctgttctacatccatcaggcactggggcagcgtctggtattctgttacctggttataaatgattttctgtcccatattctttcctctttatcttttatacataagtccactgtaattcttcgctgattgcatcatatctttccagcaccttcagaaattcctccaccagttctccatcaaactgcgtccctcttccttccttcaactgccttatacaatcctcaaagggcagcctctttcggtaatgccgatccgacatcatggcatcaaacgcgtctgcgatgcataggatccttgcctcttccggtatatcctttcctttcagtcctttggggtatcctgccccatcatagcgttcatgatgggcgcatacgatagcgcccaagttatcaaacatggtcatgcaggagaggatctcctcccccactcccggatgtttcttaatacttgcatactcttcttccgtcagtttatccggcttgcacagtatggcatccgagactccgatcttgccgatatcatgcagcaggcctgccacccgtacctggttgataaattcttgattccttcccagttccttagccagttccacgcagtagcgggacactctgtcagaatggcctcttgtgtacagatccttggcatccaccagaagcctgagcgcctccaccgtctgcatataactgttctgtatcttcgtgttcgcttctgacaggcacttattattcgcgttaatcagcagacgaagcagattattatgcagcgccgcacttacctgctccgcatagacgctcagcagttccataagagtcggatccttttcgcccggcttgctgatccccaggattcctaagacgacttccttccggtccgatagcgggatcataagccgacggtcatccgctattatctgtccgcgttctatactttcatagatggctgctatatctccttcatatttctcctttgcgatctcttcaaagtctttgtcatagcagccttttccctgaaatatattttccggcagatccagcagttctatatccgtcagtacattatccggcttgatccagacaaaaacatccttgcagccagacagttccgccagttcttccagtatcccctgtgcgatctcttctatgggaagcatcttgtgcatcggcggaatagaagaaagaatctgtgacagcccttccttatagcggtatatggtattcatatgctgaatagactttacgcagctttccaccaaaagttccaactgatcatagcggtcgctcttctcacagtacccctgtatatccagttctcgaatggtgttaagcggcggagccagttctttatgtccagtcagcataatcacgaatatcttccggtcaaattcccgcagtcttgccaccacttcatccccacagataggactcatgataaagtccagcagaaggatgtcataatgccgaatcttaagctgctccagcgcccgcagcggattggactgggtctctacttcatagcccatagaccggaaatttgccctcagcgcatccagtatattctgatcatcatccaggatcatcagtgtatatccatttttcttttctccagttttgtttttgcgcatcttatttaccctcttcttcgtaacttactcgccttccattggtatcgcggcatagaacgtagcaccgccttcttgattattctcaaaccacatcttgccaccgaactttcctctgacaatctcctccgaactgtacaatcctaatccggtccccttaatacctttcgtcgtgtacatagatcggaacagttttctgcctactgtctcggatattcccggaccggaatctcttaccgaaaggatgacttctttctcctctttgactgccgtcagaataatgtttcccccgtgctcctccattgcatcgcaggcattatccaccaggttattcaggacttgtaccagattgttcacatctcccctgatcaccgtgttttccggcaattcgtccttaatcataaggtggcagccgttcttgaacagtttgcccttcaagaacatctgtacccttttaagtgcctcttcaacggtgaattcgctttccgaagacgtgctgaggttcgtggccatgccttttaccgtggtgataatatctgacatatacgagcagcattcctggatttttcccagccactctttcatttccccggcaatctcctgatgatcctcgagggtaacttccgggtcgccgatactgtcataatattcctttaccagattatccagcgcctttacatctcccgagatcgccatgataggagtctttaaattgtgggatatgctgcctatcatctgtcccaaagaaatcagccgctctctttccatggcacggcttaagttctgctgcttgcgcttcatctcctccttaagactggtaacgtcccggaacatggctatgacgccaatcaggcggtatttctgcaaaatgggcgtaagttccacagagtaatagatcttccctttatcgcccaaaactgcctgctcataggatatggcatgaatggactgcttgcacacgtcaaagaaattcagaagattgtagatgacattcttcttccgttcttccagttcatccacaatgacgttcagataggaattcacgctcatttgataggaagctccgaatatatcatcgaacaccgcattcgaatatatgatgcagctgtctgccgaaaggatgacatagccttccgagatattgtccaccatattctggagggcaagcggcttgatgttcaggaaattcaggtaataaactgcaattccatgacagactatggtaaacaggaatgcaatcggggttgcggcgatcgacagatacacaatctttaatgtgaccagcacgtttaccgccagtggtgccagaagccctccgatatacaggcttacctgtccgaacactcttctgtggcggttccggaatccgtagcgcatcatgatgaatacagacagaatacagtagatataatactgtcctcccgacaggataaacagcggcccaaaccgaacctccgaagcatagatggaaaaatgcttataaaacaggtggtgaagcgggttcgtaaacacgatcagcgaagtaaagactggtagcacataaatcagccagtaacaccggggaatcttcatcagattcttcgtataagtgatggatgtcatcagtatggtcaccaccatcagcgctgagcagctgcaggtgatcgcatccagcacctgcaggcttcccaggctgttagtgatggtcattccattgattgcgatcagccagatcagaaggcagattgcagaaaataagtaaagtttctgaacagccagtaatttccccttaattatgcagctgataatgaaaaatgccaagactgccacggcaatatccataatatgggctgtcagtgtcgtcataacctcactcacctctgctttccataaaacatatctttaatatctccggatccggctttggccaatagaatccgatctttgccagtgcctcccgggtccttctgcaatccatgatcatatgggaggcggccagttcgcccgagaaccagctttgcgcaaacgcctgcacataaggtgaatccgacgaagttcctgcgatctccagttccctctcgaactcccggcgtcctaccgtttgaatctccccgcaggcatccagtatctcccggatggatatttctttcggattaaatatatggaatgctcctcctgtctcttctgagagtcctacaatggctttggcagccagatccacataggtggtctccagccctgtatctcttagttcctccggcatctttccgaattccagtaatccctttatcagtcggtaatatgcattgctctcctggtttttctggaatttccctgagtaagaattacataccactcttcctacccggaatattctggccgccagcccctcttcctgagccttcgtcacctcatactcggcaagcatcttgctcatggcgtacggattctccatccagttctggcctacatccagatcctgttcctcaaagatggcctttgcctgcggcgcatccagcagatattcccctgccacgctcactgtagagatatgcatgtaagatgcgcgggcttcccttgcgaattctatggctcttttggttcctgtcacattggtcttaagcagttcatcctccggcgcgaaatgcctgacatccgccgcgcagtgatataccacggccacctcgtctgcaagccttgcgaagttctcgtcatccagtccgaaatgttcctgggtgaggctgccgactacaggaatcagaaggtgctgatgctcccggcagaattcggggccgaaatgccaccgcaatgaatcaaacagccgtttctcgtcgcctcttaccaggcagcaggccttcttcccggcatccgccagttccttgaccagatagcttcccagatatccggttgcccctgtgaccagcgccgcgccttcttttacaggaatgcttttcacttcaggcagatacctggggagcctggctagttcagggatattccccgctgccttcttttcttcgatcccctcctgccttttgcacagcctgtcaatctgctctctcagagacggataatgatagaaatcgttgatggaaaatgccaattgtctctgatgatactgattcaatataataattgccgtaagggaggtccctccctgctggaaaaaggatacttcaggatctggatcctttcccagaacctcgctccagattgcagtcagcgcgccttcttctgtcgcctccatcgtctcgcaggcctcctggttggccgatgcctcccataccttctctttcttctccatagcagcaagcagttttaaatccgtttttccgctggccgtccttggcagttcatccaaaaggatgatttcggaaggaagcatatagtccggaagccgatccttaagataagcgcgcaactccttctcctggtattccttctttggaaccaccgcgcctctaaggaatctgggaattccatccttcatgatgggaaccaccgctgcctccttagccagcccggattggagcatgacggttgcaatctccactggctcaatcctgtgtccatttaacttcagctgggtatccacccgcccgatacactgccagtttccatcagcccgctgtcttccccgatccccggtcttatacatcttttccttcggattctggatatccgggacgaaaacttcgctggtcagttccggctggttgatatacccggccgacaggcactctccggcaatatagatctctcccactgaggtgggaagcaccggctttttctcctcatccagaagataatagcggcagttcccgatcggcttcccgatatgaatgctgcgctccatacggatctctccctgacagttatgcaccgaagtctccgtaggtccatagatattgaatatccgcgcttcagtaagggcgcagagccggtcttttagttccatggtccatggctctccaaggaggatgatgatctgaatgtccgccaatgccttgcagaaactttcatcgttcatgcacatcaatatccttgacggagtcagctgcaatatggaaaccttgtctgttcggattctttcggccatcttccatggaagcatcatctcttcctcatcggcaatgctgattccgtgtccctttgcggatgccaggatggtctccgtcgtgaatacgtcaaatacgcagttggatgcacataaaatcttctgctcctgtcctcccagaagcggatctaaatgcgccatcaagttggacagggacttatgaagcatcattacccctttgggctttccggtagatccggacgtgaagatgacgtttgctacatcttccggagagtttacgggaagcgctgttcttgtcacctcctgcggcccttcgtatcttaagacctggcagggtatatcctcaaacggctccgtctccctgtcatacacggccactttcacgtctgcctgtctgagcatgtatcgtatccgttcctttgggaaagccggatctacaggaacatatgcggccccagccttcaggattccaaacatcattaccagcatgtcgccatttcgcctggtcaaaaatgccgccttatctcccggcaggactcctttaacaagcagcatagctgccagattatccgaccgctccttcaattgccggaaggtataatgcctgccttctccccactccacggccctcttgtccggcatcagatatgccatatcatccattgcctgatctacagtggcgcagtcatagggagtccgcatacggtttggctgttctacaagcctcagccgatcctcgtatccaagccatggaatgtctcccaccatggatacgcctccattaaggactgcgcgtattccctggatcaggcatcttccatagaatgcagccgtcacttcatcgaacaggcaggccgcatattccatcgcgaaccgataatgaccgtctatacaggtagcctccagatgcaagtcgatcttgaccgaatgcgtgtcataaggcacataggaaagttctgcctcgcctaagaccgttgtaagccgtgatacaggagtcaggctgaatagcgtgctatacagcggattgcgtccctgctggcgttgctcgtgggccaggccaattatctcttccaaggaaatatcctggtaatcctgaattcctgcaaccattttcctgaccttcccaaagtaatcttctatcgtctggccccccttgacatccaggaagattgggagcgtattgacgaaaacgcccgtcatcttctcaagtcccggattacgccttcctgaaaatggagagcctatggccgcggtattttcgcaggcaaaacgcccctgcatcatagcgaatactcccagcaggaacatatagggcgtaatcttcttatccttacaatacatcttaaggctctcatccagttcttccggcagttcaaatccatatctgcctccggccccgtcgaattcggaaggcctgggcctgtccggcacgaaagcgctctttggaattttctctggaagaatcttcttccagtattctctgcattttactccggccgtctccatattttcatttacccaccacgcaaagtctacataggaaagttcgggcagatgaacctccttctggcaatagtagtcatgaagacgctcaaatatgatctgactgctgattccgtccgatataatatggtgcatgtcaatgatgatataaggctcatttccttccgccttcaccattgctgccctgaaaagcggcgcctttcccagatcaaacggccggacaaaccgttccatggcttcttctatgcggccgcactccatccattctaactgaaagtcagcctggctgcttaccctggcaatcagttttccctcctgcatctcaaactgtgtccgcagcaattcatcctcttctatcatccgggctgctgcctgctccaggcgcccaaagtccagccaggcgctggccttgaaggctgctggcatattgtagcctacctttgtggcatcctgactgtgcattacgaagaatccggattgtaccggagtcggcggataccagcctctctcccttgccttcggaatcctgcggccttttaggatgctatcttcaataccagctccgcgaaggaggcaggcaaaccttctcaccgtgctattggcatacagatcctgtatctgaatcactttcccgaattctttctctgtctcggtcagcataaataccgcattcagggaatcccctccggacaagaaataatccgaatgaatgccaaggccgggcttttctaatatccgctgccagatggcaagaatcttttcctcccattcatcagccggggcttcttccatgtcgggtaattccggcttcggaagccttccaacatcaatctttccattaccggtcaccggcaattcttctacccttgcagcatataccggctgcagatacctaggcagataaagagctccataggaaagaagggcctccccttccagtccctctttcgccatataataggcgatcagctggttctcgtatacggtcactgcaaccgcgtttaccagcggatgcctccctaatacggactctacctccgccagttcgattctatgtcccagcagtttcacttggctgtcattgcggccaagatacaggatacttccatcttccgtccattttccgatgtcgcccgtcctgtacatgcgctgcccttccataaatggatcttctacgaagcgttccctggtcagttcctcccggttatggtaccctctcgccaggcattccccgccaatatacaattctccggcagatcccactggaagcgcattcctgttttcatccagaatatagatcctgcagttagcaagggggcgtccgatcgtaaccggcccttttccgtccactgccgcatggctaacagcaacggttgcctccgaaggaccatactggttataaagggttgccggcgtataatcccgcagtttaagataagtgtccggtaccaggacctccccgccgcagatcagcgtctctatatgggacagggagcgcagaaatacctgatcattctggtaggctttaagcctggaaggagtcaatgccatgaatcctacatcgtagtccatgatcagccttcccatcttctgcgcgtcattcatctcttcttccgtggccatcacgatggtggctccattcagaagcgcaatgacgctctccagcagaaatgcgtcaaaccccacattgcagatagacagtactgccccctttgggtacagatcctttatagcctcctttagattcatcacgctgtgctgttctacttccacggctttggcgctccccgtggttccggaagtatacacaaggtatgccaggtctgacggcttttcctctggcggaagaatctctatcttctggctgccatgcaattctttcagagtccttgtcgctatatccgtgccagcccaggccagagaatcgtcggtgatacaaagcgccgcctgactgtcttttaacaagtccgcgatccttctctgaggctgcgcggggtccatcagcacccagctgttgccggacaggatgattccgcacaaggctgcaagcagcccttcctcccgccgtgacaacagggcaacggtatgcctgccttccggcaaaaactgtcggattcctcctgcgatacgggccgcatcattcatcaattgttcataagaaatccgctttcccctgcagatcagcgcgatctttccttcattctctcttgctgcttccagaagaccagttccaatcccggcgttcctgtcataccaggcattggttttattaaaatcaaagattacacgttcttcctcctcttcttccaggatgggaagttcgcccacaggcaggtccggattcttcagcgcctctttcaggatctttaccaggcggccatgcagcgcgtcaatctcagacgcagagaatatctgggtcaagtaatcgtaatccactacgaactggttgctggcatccctgctgcttaagtggatgcacaaggtctcgctctggtagccgcagtacatccatcggccctccagcgtcacgcgggcccctcttagatgctccatcttgccattctggtaagaaagcgctatctcgaacagctggtctgatgccacttcatttcccgtgttagccaatttcttaatgtcctcgaaaggcagcctctgatggtacagcagatgaaaccaatcgtcttttaacttatcattgaactcgttccaggtagatgccgtatctagttcatttacaaagggaagcgtattgacaaacattcctcctgactgcttttccttgtagttcagcctgttgatcgtaggaaccccgatacagaacctcgcctgtccccttacccgtctcaagtagatggcaagagccatatagaacactgcaaacggggaaaccttctcctgctggcaataccttgcgatcatgcggttcagacggccgggaagcggataggacctgcgaagtcccactgggctgatatgggcacactgatgctccttggccagtgccggcaagatatctcttaactgctccttccagtaatcccggtccctctgataaaccttcgactgcctatatttctgttcagattcaatatgaagcctgtaatcaggcgcaatctgacactgtgtctctttatcctgcaatagttgaaaatagttataaataatatgatttgtcacaagcgcatgcgaccatgcatccgcaacaatatgatggactcttgtcaatattccgcctgaactgtctgatcgcttaaatataagcatttgacacagcggagaatcacatagcgtaaaatgttctcttgccacagactgataccaggtatcaatcccctgttcattcgttcctgtaaaatcgaaaaattccgctctcccgggaatctcttccaagatatattggcacggtctgccatcccttacggtaattctaagccgcagggttggaaatgccttgtatgcaagttctatacatctctgaaggtattcaatattcaaattcccctctatcttaagtgccgtgcagatattattcatgggtaggcctggatgtgccgattccaggttccagatattctgctggctgtatgataaagggaagaaatctactggcgtcctctcattttctcttcgtctctccatcgtctgcctcatcctctagtaaataaaaatctctcattatcagtaatgtatttattatataacaaacctatggaaagcaccagataatttacgtcaatttttctcccagccacaccccggcgatgcatccggccacgctgagcaatatataaagcagggcaggaaccttctgtccttgttcaagcattcttaacgattccagggagaaggtggaaaaagtagtgaagccgccgcatactcccgtcttaagaaacaagacggcgtaagggccagcctcgcgctttgccgccaggcccacgacaactccgataaggacggcccctgccagattcgtcaccagcgtcagcaccggaaaaccgcctttccagggaatgagactgatgacatatctgaaaatggccccaatcgcccctccaagccctacccataggaatcgggccatcatgcctccagcaccttgatctggcacatctgcatcgcctttaacgcattctcatggctctctttcgtaactccggcgcagcaggcggcatccacaatgaccggcacttccggcaggaacgcctttacaatcatggcattggagattacgcagatatccgtacacaggcctacgaatgtaatggattcaatgccagtctcccctttcgcctttaagtcctgatcctgggcccgaagcagggggcctaacgcatcgcttccaaacgtacgcttgtcaatgggcatctcttctcgctccgcttcaatctccggatgaagttcccatcctttggttcccttgatacagtgaggaaccggaaggttcctgccttcctgggtatccagatatttctcgctatgggtgtccctggtataaaggatacgtcctttaaatcctttgatcttctccactacttttggcacgatcgctaccgcttctttcgttcccagcgctccgtcaataaaatcattctgcatatctactaccactaagatatccatattcctgcctccttttcggattgtctactgcttctattatatacgagatcgcgccaaaagcaattctttttaatctcctactgcatatttcccggaaatcttgggattccatcaaatccttttttcaagtcctcatcggaaggaatgtagtcggtcatctctttgttgtggagcttctcgtatgccaccatatcaaagtaaccggtaccggccagcccgaacacgatagtcttctcttccccggtctctttacatttgagcgcctcgtcaatggcaactttgatggcatggctgctctccggcgcggggaggattccctccactcttgcgaaacgctcggcagcctcgaatacagccgtccgctccacagaccgggcctccatatatccatccgcatacagccgagagagaatgggaccattccggtgtcgcagaaatcataggcacatacgcctcgggtaaggctcgggcaggaagccggctctgcggcgataaagtgatattccttctctccccttaatttctctcccatgaatggagagatcaggcctccaaggttcgaaccgccacttccacagcctcggatatagcacaacccaaacttccagtcgtgcccggatgctcttccaggatcttgcgccctatctgcgtctcttctgatggggacggcgtgacgctggctccataggtacgcatcacttcccttcggaaaggcttctgctcgtattatttccttctttttctttcattgcataaaaaaccggatacaacatgtgtatccggccttcattctctttcttatccgctataattaagcaaccttagcctttgcaagttctgccagtgttgcgaatccttctgcatcgtttacagccaattctgccagcatctttctgttcacgtcgatgttagccagttttaaaccgtgcatgaatttactgtaagataatccattcattcttgctgcagcattgatacgtgcgatccaaagctgacgcatctggcgcttgcgctgctttcttcctgcatatgcagatgtgagcgctctcataacagactgttttgcaactctgtactgcttagaacgtgctcctctgtatccttttgctaactttaatgtcctattgtgtcttttcttagcgtttaatccgcctttaattcttgccatgtcctatttcctccttcaaatcatcccacatcttacagatatggaagaactttcttcatgttctttacgttagttgcatcagtaatgattggctttctaagatttctttttctctttgtagatttcttagttaagatatggctcttataagctttatttctttttaattttcctgtacctgtttttttgaagcgctttgcagccgctctatttgttttaatttttggcatgataagttcctccttagatttttaatttatttttaacgtttttcagttaaaaccatactcatacttctgccttccagcttcgccggcttttcaaccactgccacatcctcaagcagttttgcaaaatcatccaaaatgtgcttgctctgctgcatatgtgccatctcgcgtcctctgaaacgcagggtaacctttactttattccctttgctgataaacttctttgcattattcactttcgtattaagatcgttggtctcaatattcggggaaagacgcacttcctttacttcaacggttttctgcttcttctttgcctctttttcctttcttgcaagttcatatctgtactttccataatcgatgatcttgcaaactggtggctgggcttttggagcaatcttcaccaagtctaactctgcttcctgtgcaagtttcatggcttctcttgatgacataatgcctaattgttctccatcctctccaatcactcgtacttccttgtctctgatctgcccattaatcattaaatcgctaattgttgtgcacctccatcataaaataaaaataagtgaatagtttacagactatccacttgcatacccgcataaaatgacccttcacgagcctttatactcaatatcagaccaatagtcacccgatcgtgctatggtgagagtggatactctactttgtttattgcttcacgcaagttataatttaccacacccaatgtgggatgtcaactggttattttacattttttccgcagaagttactgttcttcttgaaaaatttgtccattcatgtaataatagagcataatctatttttttgggatgacagactatattgaggaggtttttaaacatgcaaaaaaggagcaacttttccagcaaattgggattcgtgctggctgcttccggctcagcggtaggcttgggaaatatttggagattcccttaccttgcggctaaatatgggggcggaacatttttattgatttatctgatcctggcggtgacattcggctttgcgctcatgactgccgagatcgcgctaggacgtaagacaggattaagcgctattggcgctttcaagtccctggataagcgttttggctttttaggagtacttgcatccattgttcctattattatctttccttattattccgtaatcggaggatgggtaatcaagtactttgccgtattcatcagcggcggctcagcagcctcagccggagatacctacttctctgacttcatcggcggcactttcgagcctttgggctggttcttcctgttcatggcattgactgcgatcatcgtactgttcggtgttgaaaaaggaattgaaaaggtcagcaaagtcatgatgccgatccttgtcgttcttaccgttatcatttccatatatggcctgactctggatggagctatggaaggccttgtatattacatacagccgcatatgtcggatgtatcagccaagacgatccttgccgctatgggacaactcttctactccatgtctctggcaatgggaatcatggttacctatggctcttatatgaagaaggataataatctggaaagttccgttcgccagatcgaaatgttcgataccggcatcgctttccttgcaggccttatgatcattcctgccgtattcgcattctccggcggtgaccgttccgcgctcggcgcaggccctggactgatgttcattacgctgccgaaagtatttgccagcatgaaattcggaggggcgatcggcacgatcttcttcctgctggtattcttcgcggctttgacatccgcaatctccctgatggagaccatcgtatccatcttccgggataagttccactggggacgaaggaatgcatgccttttcgtggcagttcttgcgctgatcttaggggctccgtcttcactgggctttggaccgctaagcttcatcagctggatgggcatgtccgtacttgatatcatggacttcgtaagcaacagcgtcctgatgccgatcgtcgcattaggcacctgtatctttgtcggattcattatccgtccaaagacgatatccgacgaagtaaaagagaccgatggcaagttcaaggcagaaaaactgttcagtgtcatgatcaaatgggttgcccccatcttcctggtactgatacttgcaagttccgtagcaagcggccttggctggttctcaatttaatagattaatcagttagattagaagggcctgatggaatgaatacctccatcaggctttttttatatcctgtccctattccacaatccacgcttctacgtctgtagccttgatccctcctgctgtccatttattcttattatactgctttttttctcccccacaacttgtttttgaacggaaatacctgtactatagaattagaacctgtcggaaacagcatcaaaaggagttgagacaatggatcttagaaaatggagcgtactgctcgcagtcgttgactacggaagttttaccaaagccggcgaggaacttaactatacccagtccggcattacgcatatgatgaaatccctggaacaggaagtcggatttccgctctttaacaaaggccaccacggcgtctctatcacgaaagaaggaaaagcccttcttccggcaatacggaatcttctctcagccaacgagtcgctgaatcaggagatatccttcctcaagggagccaagaaaggtaccttgaccatcgggacctatatcagctgttccatacactggattcccgagatcatccaagaattccagaaagagtaccccggcatatgttttgagatcagcgagggccatgaaggcgacctgatcgactgggtggagaaccacaaggtagatatcgggttcatcagttatcatgagcatcagccttacgagttcatcccggtctgcgacgatcctatgatggccgtggtaccgaaaggccacccctttgcccaatatgacgaagttcccatcgaatggtttgaaaatgcgcctttcgtctgctctgagtatacttacggcaatgatgtccaccgaatcctgaagaccgccggaataaagccggatatcaagtataccaccagcacggatttctcgatcctgtccatgatcgagcacaacctgggcatcagcatactgcctgagcttgttcttcgcggccaaagcggcaattttgagacacggcctctaaagcctctctcctatcggcggctgggcatggctgtatcctccttccgggatatgtcgcctgccatgagagtcttcatcaaatatgcgcgggactatcttctgtcctgacgtactttgcccataatcctctcatctctactcaaataataattgcaattcctatgtttctacactaaaattgtagaaaaaggttttatcaggaaccgtacataagaaagggaaaataccatggcaaaaaaaggctttatcggcgaatttaaagattttatcagccgcgggaacgcaatggacatggctgtcggcgttatcatcggcggcgctttctccggcatcgtaacttcattgactgaggatatcatctcccccatcctgggcttattcggaggcataaatttcgatcggctctctgtaaacatcctgggagaggtcaccttgaattatggcaagttcatcaccgctatcgttaatttcctcatcatggcattgatcatcttcttcatcatgaaggcagtgaataccttagaggctcaggcagcaagattagcccgtctgggaaatgagcaagaggctccagcgcccactacaaagatttgccctttctgcaaatcagagattcccatcgatgctaccagatgcgcccactgtacctctgagttggagcagtcgtaagagatctttcacatgctgcgcaaatccgacggggcatagcctataagaaaaaagacagtcacaaacttatctgtaactgtctttttcggttgccttagttctcgtgtccttctttatgaaaaaggcttgttgcgccatacagcgctcctatagcaacgattgcccatccaatcaaattcaacatctgtcagcacctcctcgcagaaaaattattactctcttcgtacttttagtataaatcttttttccactcttgtgaaatgaggcttatttatgctgacattacacttcttaatgtttatctcgactgtcccatgctgaacacggcaacgacgcccggacccgtatggcttccgataaccgtgccaatattgttgatcaggatattggtgacacccatcttctcttccaccaattccgctacatactgggcgtcttctatacagtctccatgggtgatcatgacgatgtcgttttcccatccttcagcctgttttgcagccatatccacaatcttgttcagagacttctttcggcctctctccttgccgatcacctgaaggtatccctggttatccacatgaatgactggcttgatctgtaccatggttcccagaatagccgtcgtcttggatacgcggcctcccctttgcagatggttcagatcatctaccgttacaaaatggcagacatgcagtttattttcctccacccactttgcgacctcttcgatggtctttccttcctctttcagtttcagtgcataataaagcagaactccctctcccagacaggcgcaaagcgagtcaatcacgatgatcttcctgttcggatacttatgcttaagttcttctccagcgatacgcacgctgttatatgttccgctcagcccggatgagaagcccagatgcaatacatccttgccttcctgaagcatgatctctaatgcggctttggcctcgtcaggattcacctgagaagtgactgccatcttcccctccctgagtttttggaagaattccttggacgacagtccgttcatatcttcataggtctctccgtcaatcgtatattttaatggaataaccggaacatttctctcagtgagccattccttcggcaaatctaccgtgctatttacactaattatatagtcgctcattatttccaccatcctctccttggtctgcactaatcatatcattgttccccatattacgcaaaacctttttcactgtaatgacaaataacacgctcgtcgcaagcaccgaaatgatgtctgccaccggctctgctctgtagatgcctataacgcccatgaacttaggcaggataatcgcaagcggaatcagcagaatcaccttccgaagcagcgcaataaacagggacactttcgcctgccccagggccaggaatgttgactggcacgcagactgaatgccaaagatcgtgataccgaagaaataaatcggcataacctggcaggtcagtttcaccagctggtcattattcgtaaatatttccgcataaacgcccggtgcaaagacggcaatccctgcaagaacgatcgttgccagaaagcagaccgcgatcagccggattattgctcctttgaccctgcttttatttcctgcgccgtaattatagctgatgatcggctgtacgccctgcgtgattccctgtatcggaattacgatcagctgcatgatgctcgtcataatggacatggttcctacatacaagtcccctccgtacttctgaagtccggagtttaacgtaatgttaaccaggctctccgtgctttgcatgataaatggagagattccaagccctccgatatgctttaccacatcccccttcaggcgcatattctttgccttcagccgaatcacgcttttcttggaggtcaaaaacttgatcacccatgccgcgctgacggcctgggaaatgattgtcgccagagcagcgccctttacccccattccaaatacaaagataaataccggatccaggcagatattaataattgctccgatcaaaacggaaagcatggcaatcctggcttctccctgaccgctgataaatgtattaagccccacagcgaactggacgaatatcgttcccagcagatagattccaatataactttccgcatactgaatcgtcgtctcgctggccccgaatgcatacagaaccggagtcttaaatatcgaaaagccaatggtcagcaccaccgagaaaatcaccagcagtcctgccgaattgcccaatatcagttccgcccggtcataatcgtgctttccaagctggattgacgcaagcggcgcgccgcccattcccgcaaatgcgctgaaagccgcaatcagcatgataattggaaacgtaaccccaacccctgtcagggccatatctccatatccttggatatgcccgatatagatcctatctactatattatataatacattgatcagctgggctgcaaccgcaggaaccgcaagcgacaccatcaacttccccaaacgctcgctgccaagcctctcatccttcgtcgtttcttgcattatgtacacctctctttaaaaaatacgcattgtttattattttaacacggtctggggataatgtaaaatgggatttttttattttggtgatcgcgggcggagagtggggaggcgtttccagagcgtcgcaggaaacgcctccccactctccggcgtccacgcacttccgccaaaatcccccttaattcagcttcacattgagataattcctgcctgacagcgtcttattaaagcagaggcttatgattactatgatgcagcctgcagcgaatccaacccaattaaagagcgccgtaaggatcagaagctgaagcctcataaatttcaatgcatagcccaactcgaaattaggctgagtatagttggccacggcaacgaacgccatatacagcatgacttccgcattaaaccagccggactttactgagaattctcccataaccaggccggcgattacgctcagaggcgtgctcagcatgctgggggtattgagtgctgccagccgcagcccgtcaatggcgatttccaaaatcagcaattggaagatcagcggtatattaaccatatcttttaccgccacgaagtcaaatgctttcggaagccagttgaggttctgcataaaaagcaggaacactggcgtcagaaatacggtcataatggtaatcagcgtcctggaaaacttcaggtacagcccggtcagcgtggggaagtagtaatcattggcttcctcgatcatatcaaagatagaggtcggcagaatcatggcggatggagaattatccaccataattactacttttccctcaagcaggcatgcggcagccgtatccggacgctctgtaaacttgaatttcgggaatgggttataccattttctcttgaacaggcattccgccaggctttgctggttcatcctcaaatcatccgtccggatgcttttgatacgctgctgcaccgtatttagcagttcctggtctacccggtcgcccatatagcagatagccacgtcggttcgggaagtatcgccaacttctgtcatttccataatcaggtgaggatcccgaatccttcttctcatcagcgccgtattaaatacgatcgtctccacaaaaccgtctctggatcctctcagagacttatccttatccggctcttctacgcttcttgccggataagtcctgcagtcaatcgctatgcaggcttcgtagccttctataaagaggcaagtaacgccggataagacgtttctcaacacatcgtcaaaatcccccaggatatccacttccacatagggaatgcactccctcgaaaactgtgtggcatcagccggcatattttcctgcgttaccttgaacaacgaatccataattttgagcataacctcatccttggtaaatccgtctataaaataaaaagaagccatccggccgccaatcagcatatctctttgaataatatcaaaactatcctttaccggaagaacctgattcatataggctgcattctcttcccttgacgcagtcactttcctgttatctggcatattcctacctccgctcatttacttgctttgaggaatagactgcccagattttccgttaaatatgcagtctgggacgctgcacttaaaaaaaatgccgcgtcccagtttagtaaatctattggtttgtagtacttccaaatcctccgttacgaactgctgtcacctcatcatctaatgtgatgccgtattctacaaagattccctgcatgaacccagtccctgcctgtaattccactaccttgccctcattggtatcgttggtgatcttcgcgaaaatatgtccctcattatcggaataaaagtaatcgctgtcaatgatgcccaccgtattattcagctgcaggcggtatttaaatccaaggccgcttctcggataacatttaagtacccagtcatcttccatctccacacggattccggtcggaatctttaccgtctttcccggatgcagcacgatggataccggtgtataaaaatcatatcccgcagagcctgcagtggctcttttgggcaattggacgccgtcataagcctccttgatcttctcttcttcgatcggcccgaaggagtccatgaatccttctcgaaactgttcgaaacttaccttgtggaactttgcaattcttctagccatgtatatttctctcctgtctcttctgtaatttttcgtttgcgtctgaaaatcatttaattatattatcatccgcttcgcaaagcgtcaatgcaattaggccaaattcatctaatttccacattctatgctgatctcattgaacaacttcagaatctcatccacggtcatctgctgtttctcttcttttttatccaggatcacctgtccctgatgcatcatgaccaggcggttgccgtattccaccgcatatctgaggttgtgcgttaccataatcgtcgtcagtttcttttcccggacaatctgatctgtcaattccataatcagttctgccgtcttagggtccagggcagccgtatgctcatccaggatcaggaactcgataggcgtcatggtagacatcagaagcgccatcgcctggcgctgtccgcctgagagagagcctacttttacatccagcttatcttccagccccaggttcagctggctaagctgctcccggtagtaggcaatgcgggccttattggtccctcttcccagtccgtagagtttccccttgttatctgccagagacagattttccagtatcgtcatggatgggcaggttcccatcgccggattctggtatacacggccaatcctcgcatttctcttatactctttttccctggtaatatccttgccgttgatcagtattttccccgcctcaagcggaatgctgccgcagatgatattcagcatggaggtctttcctgagccattgcttcccaccacggacaggaagtctccctgttcaatcttcatgctgaaattatcgaacaggcacatttcgttaatggtaccgggattatagtatttgtggattccgctaagttcaagcattcttattcaccttcttctttctttccatgctgatgaccaggattaccaggaacaggactgccgtaatcagcttcattgcctgcggctcaaaattgcgaagagcaaccgctacgcaggccttatagatgatcgagccgattaatacggcagacgtggccttaaggaatgtcatcttcttaaagatgctggttccgatgataacgcttgccaggccgattacgattgcccccgtacccatggatatctcaaatacccgttcttcttgggcaaatacgcagcctgctaaagacaccaggccgtttgcaatggcaaggcccagaatcttgacattgccttgatcctttgcaagggatgtgaccagcgtatcattatcacctgccgccctgagaagaaagccggattttgtcttcaaatacagatccagcagcactttgcataggattgccagtaccaggacgatcagaagcgtcgtatattctgagacgctgtctggtatcacgcgcttcataaaatcattcttaaatattgtttcctgggagaacagcggaacatttgccgtccctgcaatatacaggttgatggtccataatgccgtcatcatgatgattcctgacagcaggtcgcgcaccttgcattttacatggatcaggccggtacagatgcccgccagcacccccgctccaaaggagagcggcagggtcagataaggattcatccctctcgtaatcaaggccgccgtgatagctgctcccaatggaaaacttccgtccaccgtcagatccgggaaatccagtatcttgtatgtgatatatactcccagcgccaatatcccataaatcagcccctgttccgcaatcgttactataaaatccatgaaaatgcctcccaaattctttctttactcagtaataatatcgtcaaaactttcaaccgcgccggatgcaagaccttccggaacggtaatgcccagattttccgcaacctttgtatttacgtagaatcctggctctgtgatcaactcaaagttcatttcggatgccttcttttcgccctttaatacctgtgccgccatctgtcccgtctgctttccaagagcaatatagtcaattccttctgccgcaaggcatccgatcttcacctgctcgatctcgctgccgaatacaggaaccttcttatcatttgctttttccaggatggttggaagcgatgcgaccaccgtattatccgtcaggttcgtgatgcagtctacttcgcttaacaggtcatctgccgcaagcgccacatctgcggttgccgtaattccctttgtgaccagttcaaatccgtaatctcctgccagttcctcatattccgcaatggcagatacggaattggcctcgctggtcgtatacataattccaagcttcttggcatccggaagcatttcacgcatcatttccagctgctgcttgatcggaagcttatcggatgtccctgtcacttcccctaccggcttgccatcctcatcggacagttccgccgctaccgggtccgttaccgcagtatataccacaggaatatctctgtccatagccgcattgaacgcgctctgggcgcttggcgttgcgatggcgcagatcatatccactttatccgatacgaaggagtcagatatctgtcctgccgtccccatgtctgccgcggcattcttatacttgaccgtcaggttatcgccttccttaatgccttccgctttcagtcccttcaggaacccctcccggcagttgtccagagagccatgttcggcaaactgctcaattccgatcgtgtactctttttttgaactgccctctggcccggatgactttccacatcctgctgtcattgctgccaccattgctactgttaataatcctgctactacttttcttttcattgtttcattctccttttcttgtttttgatatccggactgcagatagccagccatccggtattgctgttaggagagaaaacttgtgggccgcggttttttgtcaacacgcaaaaaccgcctcaaaccactaggtttgaggcggtaataaactacattatcgcggtaccactcaaattgacgaatcgtccacttttctcatgtactaacatacactcctgattgataacgggttcggttcccgacaagccatactctcttacggtttccggctgccctcgaaaggccattcaatcatcaactccatacggcaatcccaccatcagccgctctctttgatgtcattcgataatctactcttctttctcaacggttttaacttattcatattattaactttaattcaacaaagtgcatttgtcaagacaaagttttgatttttcattagtcttttattactggaaccggagtactatccaccttatccagatcgtttatgtacatcttcgtttcttttacgatgacattagataacagcagtacggcaactaagtttggaattgccatcaaagcattcaggatgtcagccagcgtccaaacgatgtcaagcgctactaccggggcaattgctgcaaccagacagtaaacaagacggtaaggaaccagaccctttcttcctgcccagtactcaatgcatcgctcgccataatatgcccatccaagaattgtggagtaagcaaatgaaatgatgccaagtgtcaggatgattggtccaaggtacggaatctgagagaatgccatggatgtaagaacaccaccgttggaaatctcatccgcattgatcgacggattcttcataatcgttgtaacaagtacaagacctgtcatagcacaaacaactactgtatcccagaatgttcctgtagaggaaaccagtgcctggcgaaccggatttcttgtctgagccgctgctgctgcgataggagcagaaccaagaccagattcattagagaacagacctcttgcaacaccaaactggatcgccattctgataccggtaccgacaagtccgccggccgctgcgcctggcgtaaatgcaagtttgcagataactccaagagccgggatgatgaaatcatagttcataattaagataataatacatcctaatacatagaagattgccatgaacggaaccagtttctcgcatacgcttgcgatggatttgattccgccaaagataacgattgcggtaaggatcgctacgatgattccaacgatccacattgggattccgaagttctcattacatacggtcgcaatcgcattaacctgtgtagcgcagccaattccaaatgaagcgaatcctgcgaagatcgcaaacagcatgcccagccattttaagttgaggccacgggacaatgcgtacatcgctccaccttgcatacggccgtcttctgtcttaactctgtacttaacagcgatcagggactccgaatactttgtcgcgataccgaacacgccagtgagccagcaccaaagaactgctccaggaccgccaagcgcgatcgcggtacccacaccgatgatattaccggtaccgatggtagccgccagcgccgtagtcagggctccgaactgggaaacctcgccttctgcgtcaggatcttttgatacagataacttgataccttttgaaatggtcttcctctgaatgaatcccaggcggattgtcatgtagatatgagtacccagcaataagataatgagccaccagccccataccaatccatcaatcttggttataactgcactaatactgtctagcatattattcccccttctctttcctttgctttttaatatgcacttcatgttaaaaatagtactacgataaaaacaaatggcggcggcatatctaaaccgccctctgcatcacctaaaaacattgtacatgaatttgtagaaaatatcaactatcgttataaaattgacattcaattggtcataatgacgaaataataaagattattcttcatttttcaatttgttaattaaataactaacacttttttctcacaatttaaggtacttccagaaacctgcagagattgaacaggcactcagacttttatcctgcctgagtgcccgttatgcaactttcacaaattgtattttttgaatagtttctaattcctgtccactatatgtggtaccggcaggcatctcgctcttacgggggctctatcttcagtttcaccagcctgcctgcctctctttgcaatgcttctttataagaaatgttctgatatctcttaatctggattcccgttgttcccatctgacgggctacctgttctggagaagcttcgtatgcgaacagggtacatccgcagctgttccggatgctctgcgcgctgtaagaaggtatgcctgcttcctgggcatatttcttcatcattctactaatatacatggtattgagcggattccctcttctattataaaaaagatacgaattgtcttttctttctgccaaatacttctcaagaatctgaaatgcatcttccgggatatagcataagcccctccggccggctaccgatgcataaattccgtccccatagatgcctatatcctctggcttaagtcctgcgatttccgtggaggcaagccccgcccgatacatcagcacaatgatacagtacgccatcagatcttccctggcagcctcaagcagccggtcgatgtgggaagggggaatatgttttacaaacttttcctgctttgccaccatcttaaggtagggataatagccgtcctggtaaccctcatcaacctgataccgctccctattctcacagatatacgctgcaaaagaatggagttcccgaaactttttcgccatggtgccgggaagaatctctcctctggagacacgttccttaagccatcggaaatatacccctgcatcctctccattgattgccagaaagtctttatgaaaataatccatagcctcatcaatatccgtctggtaggaagcctttgaggtgctacttttaaaatggacggtaaaatctctccaaatggcttgctttatgactttggaagcgtatatgcttttcattggcccctcctccttgtctgccgtccgcaaggcggacttcggcattatgttaatagtatacttcatactataacatattagagaggaatcggcaatctttcgattgccttatcttatttacggatcagatattttgtcttttgatagtcctttttatgcacatatatttcatattcgtactggaagtctatattctgaccaaaacttccggcccgtccccggattgttccctctaaagcccatgagccggcatgattgttcaccttctgggcataatcaatctggtttgcctccagtatctctcgtatccggttgaattcctgcagatcaaatcctatatagacgttttccctgtttaatgccgtaatcatctaatccctcatttcctattccagaacatcatctttccaaagacagatattccgccgccttaagcacgtgctttgccagtacggaggaagtgacgcttccaacgcctctgggtaccgggctgatataagatgtcactggctctgccgcattaaaatccacgtctccgcatagattacctttggcatccacattgatgcccacatcgactaccactgctccatctcctatcatatccgcagtgaccatcctcgcctttcctgctgctgccaccaggatctccgcctctcggcaggtagcagaaagatctttggtacgagtatggcagatggtgaccgtagcatgcctcttcagaagcagcatagaaagcggcttgccaaccaccatgcttcttccaatcacggtcactttcttgcctctgggatcaattttataataatccagcatttccatgactgcctccggcgtgcatggcgcatggcctgtctcatccccggaaaatacttttgcaatatttacgggacacatgcagtccacatcttttagcggattgatccgcgataccacgggcccttcatccagatgccccggcaggggacggaacaggaggatcccatgtaccttcggatcctcgtttatcttgaaaaaggtcttttcaaattcagcctgggtaatcgtttcgggcaattctactaccttgcactcgatcccgatcatctccatccgctttctggctccccgctcataggcaagatcatctggccttgccccaacccttacgattgtcaggctgggaaggattcctctgtctttcagcctgcgtgcctcgcctgtcaagtcttccttcatggtcttggccacgtcagcgcctttcatcaatatgctcatataagattcctcctgtctactggatatggccaaggacgtcccgatagatgatttccttccattccctgccttctgcaatcatagattccgtcttctggttcagtttctctgcccgcccccggtctttcatcaatttcgtattgataaacacattgagggaggctccttccagcgctgcctgggcaaataatactcctacgcccacgtcgctgaccgcgatgcggctccccttctctcccaggatcttaagaagccgcattacctccagcaccgtctccataatctcgataggaaccacgctggcatcatacagcgcgccttccataattctggcttttgcgtccttttgttcctccgtatccttcggaagcccataggctgccgacaggggcgcgaatgcttcggcatccttgtctgtaaggtcaatcaatttgtcttgcagcacctttagctgactcccgacagactgaatctcctcctcaacatctgcatacttcttcttgcccacagtcagattcgcaaccatcattccaagtgccgaggcaaacgcgcctactgctgccgaggctccgccgccgcccggtaccggctctgcggaagatagcacctccaggaattctgtcgtcttcttttctagcatcatgttgtcatttcctcctttggcagcggattcatcaccgcttctttcttggcatcgcatgtaccgcttcgcctgtcgcgtcttccaacgcttccgcaacgccttcattataagtcggatgggctctcattgcaatcagaagctgccctgccgtcatcttatttgctatggctgtcccgaattccccgatcatgtccgtggctctcgcgcacatcatctgcgcgcccagtatcacttctgatccggcatccacgatcaccttgataaatccgcgctcctcttttgttatcagcgatttcccgttggcgcccataatgaatttacccgtcttgatctcgataccgctttcgttggcatcttcttccgtcattccaacggaagcgatctccgggtccgtatatacacatcccggcacgatatccagcctgaccgtcggcgtttttcctgacagttcttccgctacaaagattccctgagcgcttgccagatgcgccagctgcatgccttttaccagatccccgatagcatatacgccatccatgctggtctgcatccgttcatccaccacgatacgtccgcgttccatcaaaagagaaacgccatctccaaacagcccgtccgtatttggacgcctgcctactgcacatagcacgtactgggccacaacttctgtctctttctctttttcaaggaatcggcaggcatagagtccgtccttctctactatttcctggactgtcgccgaggtatggatatccacccctcttttcttaagaatcatcttcagattctgagagatctctttgtccattcccggaaccagccttggcatagcctccacaatggtcacccgggtgcccaaagacgcaaatgctgtggcaaattctacgctgattacgcctccgccaatgatggtaaggctcatgggcgcttcctttaaccgcaataactcgttgcttgtcagcactcctttaaggtccatccccggaagggggagaagcatgggctttgatcctgctgccagaatcacattcccagcttcaaaagtacgaatcccttcctcggatgtaactgtcactgtccggtctatctcaagccttcctttcccatacagcaaggtcactttgttcccctttagaagctgctccactccccggcataaacgttccgtggtttcttctttataggtaagaaccttggcgtagtcgtaactcacctctttcgccagtattccatatttctcgccatccaatgcctgacggtatagcgaagaagcatgtatcagcgctttcgccggaatgcacccccgattcaggcaggtgcctcctactgcgtcttcttccactaccgccacctgcaatcctgctttcgccgccttgatagccgccacatatcctcccggtcctgctccgatgacgatcaagtcaaatctctgttccatggctagtctcctttaagttcctgattcttccggccggtatctaagtaccggatgtctcgcagcgcctacctcgtccagccttgtcaccggagtcgtcacgggcgcttcatgaaggctgtccggatccttccctgccagttcatacaattcccggaagacctgtatcgcttcatccagcgtctctttggactcggtttccgtcggctctaccatcagcgcctcctccacgatgagaggaaaatacatggtcggcggatgaatcccgtgatccagaaggcctttggcaatatccatggccgaaactcctgtctgcttcttcaaatccgccaggctcataacgaactcatgcatacacacttcattgcatgctattgtataaagatcctttaacttatgcatcatataattggcgttaagaaccgcattctggctggcttccagcaagccttccctgcccagagtcaggatataagtcagtgcctttacgactaccaggaagttcccatagaagttctttacttctccaatgctgtttgccggctttacaaaggttaattcctgatcgccttctaccagtacagatggaaggaattcagccaggttctccttacagcccaccgggccgcttcccgggcctcctcctccgtgaggcgtggaaaatgtcttatgcagattcagatggatcacatcgaatcccatgtctcccggacgtacgactcccataaccgcattcagattagcgccgtcatagtagcacagcccgccgcaatcatgcacgatacgggtaatctccagtatattcttgtcaaagagtcctaccgtattggggttcgtcagcatcagtcctgcaatgtcatcccctgccgcctccttcagtttttcaatgtccacgcacccctccttgcttgaaggaatgctgaccacggaatagcctgccatggccgcgctggcgggattcgtgccatgtgcggaatccggtacgatgatcttcgtacgcttcgtatctcctctgcttatatggtacgccttcatcagcagaagccctgtaaattccccatgggcgccggctgccggctggaacgtcatacggctcattcccgtgatctcgcacaaatatttttctgccagtttcatgacctccatgcatccctgtaccgtatgcgcgggctgaagcggatggatctctgtaaatcctggtagggccgccatatcctcattgattttggggttatatttcatagtacaggaaccaagcggatagaacccgtcattcacgccatgggtcttcttggccagttccgtgtaatggcggcttaactgggtctccgacatctctggcagaggcaatgcaagtcctcttctatccttttcctcaggaagcacttcgtcaacgtcgcatggcggcagaagggatagttcccttcctggcctgcttttttcaaatatcagcatgcactacacctcctttaagatgcggatcgtttcatcaatctcttctttactgttcatctctgtgcagcaccacaggattctcctgtcatccagtggatatcctcccagaacccctttctcttccaatgcctttagcgccctggctgatgaagtctgggatacggtgacgaattcatggaagaattccgccttattctcagtctgatagccaatcttctttagttctgctgccatataatgggctttggaagtacactggatcgccgcattgtgaagtccgcttcctcccatagctgccagatatacgcctacggccagcgcgcatagcgcctggttggagcagacattgctggatgctttttctctccttatatgctgctctcttgcctgaagcgtcagcacatatccggtctttttatttctgtctgtggtctgcccgacgatcctgcccggcagtttcctggtcatgccttcgatacatgccataaatccaagatacgggcctccaaatgcgatggatagtcccatgggctgtccttcccctacggccacgtccgctccatactctctgggcgtcttcataattccgagagatatgggatttactcccatgatatatcttgcccctgcgccgtgagcagccttgccgatttcttccgccggctccaggcttccataataattggggtgctggatatagacgcatgccgtctgatcatcgattatctcttctaagaacttcacatccgtgatcccgtcttttgcgggtatcaccacaagttccatctcatttccaaagcaataggtcctgaccgtgcttaagacatccgggtgcacagtggaggatatgaaagccttctttctttttctctccctgcacatagcaacggcttcagctgccgctgtcgccccgtcatagacggaagcattggatgcatccattccggtcagctggcagatcattgtctgatactcaaaaatggactgcaggataccctggctgacctctgcctggtatggcgtataggccgtcagcaggttctccttggagatcacgctctttacaatggaaggtataaagtgcctgtatgctcctgctcctcggaaaattgtcccaaacacctgattctttcccgcaatcttctgcatcttcctgcgtacttctaattcggacattccctccggtatcgcaagacttcccttcacctttacttcctcaggaatgtgtccgaacaaatcctccctggcctgaaaaccaatctcttctaacattttcagttgctctagttctgtattcgggacatatcttcccatggcctcgcaccgcctttcttcttactcttgctcgctgtctacaaacttctcatattccgcggcagtcagaagttcttctttctccgtgatttctcccaccttgataagccacgcgtcataaggcgtctcgttaatagtttccggcgtatccagaagttcctcattgacctcgcatacggttcctgataccggcgaatacacatcagagactgccttgacagactccacatctgcaaatgcctctccgacggtgacctcatctccctcttccggaagatttacgaataccaggtcgcccaattctgactgggcataatctgtaagaccgattacaacggcgtctccttcctcctttacccactcatgtgatttagaatatagcaatccttccattaattccatgacaatcgtctcctttcatcttttctatatttatttgcttcttttataaaatggtaatgctaccacgaaagcctcaacaatccgtccacggacttctacttccaccttggttccctcttctgtatatgcggcatccacaagtgccatcccaatagggtagccaaggaatgggcagtgggttcccgacgtggtatgaccgatgacctttccatccacaaacacatcctgatgctctcttatgattccccgtccggttactttaagtccgatacgctttctctttggctctccttgcgcaatcagcgcatctttgccgacaaagtcttcttttgccatcttcacggcaaatccaagcccggtctccagaggggtcacctcatcatccatctcatgcccataaagcggcatcgccgcttccatgcgaagcgtatcccttgcgccaaggccgcagggaatcaggccttcttcttttccggcctcaagcaggatatcccataatttttcggcaaggccggcatccagatataattccacgccatcctccccggtatacccggtctttgaaataatgcacggaataccggctgcttttgcatcaaacaccgcatgatagtatttctttggtatgtcctcttcttttgcgatcttcctgaggatttccattgccttaggtccctgaagcgcaagctgcgcatactggtcggatacgtccctaaatgaggctttcccaaactgatgcgcaagcatccattgataatccttatccttattggccgcgtttactacgataaaatattgattctctgccttcttatatacaatcagatcatccacggtaccgccgttctcattgcacatcgggctataccttgcctgtccgtctttcatattatcaaaattgttggtcaggatcatctggagattcgccagcgcatcctctccctcgcacagaatctctcccatatgggatacatcaaacagtcctgcctgcctgcggactgccatatgctctttgattacacctgtaggatattgtaccggaagaatatatcccccaaaaggcaccatcttccctccggcttttacatgcgcatcgtacagcggagtctttaattccattcatcttcctccttttcatctgatctctgccccaatatccgggtggataaaaaacagggaaatataaccatccctccctggatcttatatctccctgtcatcctttcccctaagcatcgctcaaatcacttacctttaattgtttattttaatttgatttcattatactcatgaggaaatattctgtcaatatttgttttatttttcacactatgataatattgacgcaattttcacaattaaacaaaatacttatcggttcatgatgtgaattgccctattctgggctatgataaatcttctgatagttttaatttgcgtgccacattttcatcctctgatttttaattaaataacaacgggcttcatatgcaaaaactgtcttacgccatttgaatttttaatttacgccatattacgccatttacataaaaagttataaaaaactataagaaaatacatgaaattcgtttcaaaaaggcattactttttatagattatggaacatccaaatatgagagaaacgtgtcagccatgcggtttgtgagcattttaaaatggcgtcccttccaaatcataaggtgtaatctggtaaacgtaataattcagccagtttgtatacagattgttagctgtggcacgccacgtaaggagcggcttattctctggattgtcatcctcgtaatagtttttgggcatctcgatcggcaggcccttgctaagatcccttttatattccccatccagggtcacgcggtcatattctggatggcccataacgaagatctgacgaccttcctctgccattgcaaggaacagcccggcttcttctgattcagccagcacggtcaggcgggggtccgcatgtatcttttccatcggtacatccgtatgtctggaatgcggggcgaggaatacatcatcgaagccgcgaaccagaggaatcttgcggttcatcaccttatgccagaacacgccgaacagtttgtgatccagcgccaccttatcgattccataatgatagtagaggcctgcctgggctccccagcataggtggagcgtagatgtcacgtgggtcttgctccactccatgatttccttaagttcctgccaatagtccacgtcttcgaaaggcatctgctccaccggcgctccggtaatgatgaatccgtcaaacttcttatctcttacttcgctgaacttctggtagaacttattcagatggctggttggcgtattcttggactcatgactggatacggtgataaatgatacgtccacctgaaggggcgtattggataaggatctaagtatctgcagttccgtgtcttccttaagcggcataaggttaagaagcccgatctcgataggccgtatatcctgatgcgttgcccggtgctcatccatcacaaatatattttctctttccaatatctcctttactgggagatcattctgaactctgattggcatagtctttatttccccttttctttgttattgttattgacttcgtttccatcttcaccctcctcggaatggtaatacttcccatcgtcatccacataactcatggcatcatagaagttggagttggcaggcagcttcttgcgctccaggcgataattcattatcatctgcacaatataatacagcacggcaaaggtaggaacacccataatcattcccacgaatccgaatagccctcctccaagaaggatcgccacgattacccagaatgccgacaggcctgttgaattgcccaggatcttcggccccaggatgttgccgtcaaactgctgcagcaaaagaatgaaaatgataaaatacagtcctttgatcggatccgccagcataatgaggatggcgcttggaatcgctccgatatacggcccgaagaatgggataacattcgtcactcctacgatcacgctgaccagcacggcataaggcatattcaatatggtgagcccgaaaaagcacagtaccccgataatggcggaatcaatgatctttccaataataaaaccgccaaatatctcgttgctcttagtggtcagatgcagcaccatattggcatgcctgggagacaggatcgcatagacgcatttcttcgtctggcggataaaagtctccttgctgaacaatatgtacactgaaatgatgattccaatcagtgcattaaatatttcgtttaagatattgatcacgcctaccgtcagattggacataatctcattggcgcgcccaagaagatccgtcctgagccacttctgcagcatgtcggttccttcttcaatagcggccttaataagcgtgccggtggtagaatcgtcgatctttatagtgttgagtttatcaaccaaatcattgagctgtcccggaagggtgaacaccaggttccggatgcttgaataaagttctggaatcagcatgttgcacagtgtcaccaccaataccagcaaaaggatcagggacagcaggattccgattcctctggcagtcttctttgccctgcccggagtctttaccttcttctccagtacaggggccagatacttgtctgccttcttcacgatcggattcagcagataggcgatgacgcagccatagactaccggcttaagaacctggaatatctttgagaacccttcggacagattcgtcactctaagcagggcaaaataaaacaagatgctggcggccaccaccagaaaatacgtcattcccctgctaaactgctgccggagttttgacgggccgcttccacccaatttcggccggctggaataatacgcgttctggccgcgatctttctccttctgtatgctgtccacgcttgcttcttctttgttcattctatcttcctcttctcttacacagataaaataattataccctttgaacaaatatgcgtcaaccaaaaaggaagcccgaaggcttcctttttctgctctgcttcttagttgcatccacacttgaacgtggcacattcggtctgctcgcactggcaggcattgcttccttccacgctgatctttcccgcgtggcactcgcatttctcattatagatacattctgtagccttacagtcgatgctgctgcatgcggatgcctgtccatttacatcgctgtgggaatctcccttgcgctcctcgaaactgtcgcagcaggtttcttcagaacgctttgctgaacttcctcctacgataatgcgctccaggtcacagtagaaattcttgttgtgcgtacatgtctgtactgtacatttcaattctggcataatattacctcctaatcattcaagaatatcgagatttattatgccctgttttttcatttttactctgtacttcctaatcctctttcgtaacttcgcgctgaacctttgcctgtatctcttctttgatcgcatcgataaatgaggcgatgtccttctggccttcatccccggcaaatctgcttcttacggataccagattctgctcttcttcttttgctcccaccacgagcatgtatgggatcttgttcatctgcgcttccctgatcttgtagccgatcttctcagccctctcgtccagttccgcgcggatccctgcttcttctaactgtgccagcactttctttccgtattccagatgcttctcagatattggaagaacctttacctgaactggcgcaagccatgtcgggaaagctccggcaaaatgctcgatcagaattccgataaaacgctcgatggatccgaatgcaacacggtggatcatgatcgggcggtgcttctctccgtcagccccagtgtactccaggtcaaaacgctgcggcatctgcatgtcaagctggatggttccacactgccatgtccttccgatggaatcttccagatggaagtcgatctttggcccatagaatgcgccgtctccttcatttaccatataatcaagccccagatcatccagagcgcctcttaagccttcggtcgccatctcccagtcttcatcgctgcccatgctgttatccggccgcgtagacagttctacatggtacttgaatccgaacaggctgtagatctcgtcaatcagccgtgctacgcctttgatctcgtccctgatctgctccggagtcatgaaaatatgggcatcgtcctgggtaaagcagcggacgcggaacaggccgtgaagagcgcctgacttctcgtgtctgtgtaccaggccaagctcgcccatgcgaagcggaaggtctttgtaagaacgcggctcggacttgtataccagcatgccgcccgggcagttcataggcttgaccgcatagtcttcttcatcgatcatggtggtgtacatattgtctttataatgatcccagtgcccggaattctcccacagatgcctgctcaggataataggcgtggatacttccacatatccgttttctttgtgcagttctctccaataatccagaagcgtattcttaagaaccattccttttggaaggaagaacgggaatccagggccttcgtcgcacatcatgaacaggccaagctccctgcctagttttctgtggtcacgctttttcgcctcctccatcatatggaggtattcttccaggtctgccttcttcgggtaggagatgccatagattctggtaagcatcttgttcttttcgcttccgcgccagtatgcgcctgcaagacttgtcagtttgaaagccttaaccgcttttgtagacataaggtgcggtcctgcgcacagatctacgaattcgccttgcttgtagaaactgatctcctcgccttccggcagatcttctaccaattctactttatatggttcgtcattttctttaaaatatgcaatggcttcttcccttgtcttggtaaagcgttcgatcggcaatgcttctttgacgatctttttcatctccgcttcgattttttccagatcctccgcgacaaatggcgtctcgcgatccaaatcatagtagaatccattgtcaatggatgggccgatggccagttttgtctccggatagagacgcttgatcgcctgggccataatatgggatgtggtatgccagaatgcgccccgtccgtcttcagagtcgaatgtcagcaattccagttcgcaatccttggaaacatccgtcctcaagtcaacgatatccccgtctatctttgcgcaggtcgctgcccttgccagcccttcgctgatatcttttgcaatatccaatacggacatgcttctttcataccctttttcagaaccgtctttcagtgtgatcttcataatctgtaacctctcttttctttcttgatatactctatttatttttgtggtcttccagaccttttacaaacatgttgtggaactccagacacgtctgcttcagcgcaagcggctttccttcccggttaataaagcaatgcctggtgattccccggcagtggaccatctgggtcttgtccgagatcacctcgtatcccacggtcagcttgatgccattgtactccttgacgaaggtttctatggtcaccgtctccccgaaatggaccatcctcagataatctgcttcaacggacagtaccgggcttagaattcccttttcttccatctggtcataccccagccccatctgttccatataatcagtccgtgcttcttcaaaccagcggatatagttggaatgatgcacaattcccatctgatctgtttcataatactgtaccttgtgcttgtaaggcttcatcttccccgtcctttcctgcctttcgggcatgtcatagcatggaataaaaaagtcccttacagcctgcatgctgtaagggacgagttcatcaagtctcgcggttccaccctgcttgaactggcatattcgccagaaccacttctttcatgatggtaacggaatcaccggactgttttgcagccactcggaggtagtcttcagaaggttccgtaataaggggcttgcagcctttggctcctctctctgtaattcttccccaacctactcgtctcgtcaacgtgttttgatatatgttaccattataacactgtcttattctttgtcaacacagagtttctgcaatttcagaattttctcctgcaaagactcccgaacaggccgtgccacaaggtccggacaccccaggtaatacccctgcatataatgcagcaccacattcctcttttcccttttctcatcctcctataaaaatagcaacgtgtcatatggatactataacacattgcttcctcaaaatcaaaaaaacagccacatcttccacacggcaaagcattctctgaccatgtaatttacaagcagcgccggatggcagctggccgccagcgggtatggatggccgtatccaagtcgcctggcataagcgcaagcccggtacagatgaaaattattggatacgattccaacgtcagcctccccgcagttcatgtatcgtttggagaacttcaggttctcctgggtcgtagtggatgcttcttccttgatgatacgataagacgcgattccctgcgcgatcaaatagtcttccatcgcctgggcttccgtaacgtcttctcctgtgccctgtcccccggatacaaccgccctggtcccaggatgtgcctttagataaatcaaagccttattcaggcggcggtacagggaatccgtgatttttcgcccttctacatgggctcccagaataatcagataatcatattccttctgtccccgtggaaccattcccatgacaatcctaagttctgtcacgacaaacacggctacaggcagaagaagcgccttcctggccgctgcttccatcccaagccggactgcggcataatcatacagccagagccccaggcctgccgccagccagaatcttgaaaatgtggaatcccatttctttagcgccacgcataggacggcatagtacaaaaggcatgctgcccccagaagcgtcagcattatctaccacaacatttcttatacttcttgccggagccgcatggacacggatcattacgccctaccttctttcccttgcggatagtagtggactctttctgctccttgtacagtttcttcagttcttcctccgaatagatctccttccactgtggaagttcatacagccagtccgctttggctgccaccatgttcttatataatttttccttatcaaaggcaaggctgactacggtatcttcctccatcgtctcaatcggattctcttccttcaggctttcattgattccatccaggaatccaaccatggtaagcacttcctggccatacttctctgccagttccctgacggtgccctttacctcctcgtccgggttggacagcagcttttcatagatttccttctcaatctggaaataggtgccccagaaattctgcaactggcccctgtctgcctgctcatcataggcaatatctctccattgatctaataatgtacgactcatattcatatactcctttgtattcatttgcaattttctcttgctctttatataatatactaaagtcttgattggatgtaaaggatgattctgatgaaaaaagtaaaacgtattctggctttggcaggcgcagtccttctattttgcatgtatgcaagcaccctggtgttcgccctgaccgaccgttcgcagacaatgggccttttgaaagcgtccattgcctgcaccataattcttccagtgttaatatatgcctatactctggtatataaggtcactcatcatgaccaggatgatgatgacaccaaatagtactcaaaaggcgtcagtcctcttgctccccgtagcagttctgactcttttttggcgtgctttttttccttctcccttatcttttttctcttggcaaggtattcttccattgaaatcacttctggctctggatattcccagtctctcttatgcataaacgatacctccatttccattatttatactcgttttttgttaaaactccgaactcccgactctattattatattgctacggtccccattatatgactcttttgtgtcaatactatggaaattatctaaaataatggtgatggtttccttaagaatttcaaaaggcgccctgcctaagattccttagacgggcgcctgcatgtcttacacattcctatatataatatcatttcttcccgggccattcgataccatggtgatcgggtatccgatctgcgcttcgatgaattccacatacttcctgcagttttccggaaggtcttcatactttgtgatgccccggatatcgctcttccatcccggaagcgtctgaagcaccggccttgcccgatcaagacgatgcgtggtggggaagtccgtggtaaccgctccgtcaatctcatagcctacgcacaccggaatctcatctaaataccccagcacgtccagaaccgtgaatgccacgtcggtcgttccctgcattctgcatccgtatttggaagccacgcagtcaaaccaccccattcttctggggcgccctgtggtggctccgaattcgccgccgtctccgccgcggcgtctgagctcgtccgcttcatctccaaagatctcgcttacaaatgctcccgcgcctaccgcgcttgagtatgccttgcacacggtgatgacctttctgatctcgtatggcggaatgcctgctccgatggctccgtaagcggccagcgtcgaagaagaggtaaccattggatagatgccatgatccgggtcttttagggagcccagctggccctccagcagaatctccttcccttccttcagcgcattgtgaagatacagcgaagtgtcgcatacataaggctccaccatcttcttatagtcttgcagttcttgatagagatcgtcaggattaatcactggcttgtggtacagatgctcaagcaggacattcttctgcagggccaccctttttaccttgtctcttagaagttcgtcgtcgaacagctcgcttacctggaatccaatttttgcatatttatccgaatagaatggagcaatccctgacttggtagagccaaaggacttccctcccagtctttcctcttcataggcatcaaagttcttatgataagacattaccatctgggcacggtctgataccaggatcttgggcataggcacgtccttgtcaatgatggactggatttcctgaaagagaaccggcacgtcaagagccacgccattgccgataatgctggtcgtatggctgtaaaatacgcccgatggcagcgtatgcagtgcgaacttaccgtaatcgttgatgatggtatggcctgcattggctcccccctgaaatcttacaatgatgtccgcctgctgggcgagcatatcggtaatctttcccttgccctcatcaccccagttagcgcctactactgctttaaccattttcattcctcctgcgatctataatactttaaccttcaacttttgcattatactatatttttcccctcctgtaaaatgcattttaattcaaatatttctattattcgatgatattttcatgcatttcatataaaagttcgttcaccgctgaaagggatgccttcttcttaagtccgaacaagatgatgctgtctcttttgttctttacatacagaatcggatattccgatatcttcagcatcttctgcatctcttctatggacagttccatcccgaatccaagagcaagaagcttatcccggttgggctttcgcgtgccggagaatatctggtatgcatagattctgtccagctgggacttgcggatgacatccgcctttttaagtcctttcattttcatcacttcttccaggtattgggggagtcccatatctacaaactccggcccttcctgcaaatattcatcaaaacttttcttctgctttaaaagttccagcagttcatccgtggtttttcggcttgtctccatattttcacctttcgttatttacaaatgcacaacttatgataaaataaatatcagaaaattgcaagaacaaagaatggagtactatggggaatctgaaagccgaatatctggaacaaacctatattgaccttgcgcctcttaaggatgccgaagactgccgcacctatctgacgcgcagccaggttgacggaagcctggcagtacgcaaggaaatctgcgcccttcagtacccattgtaccagcagttaatcgacttttcccatcccagtctggcaagggtgctggagacttataccaaggatggaagatactttgtactggaagaatatgtcagcgggtctaccataggctcctacttaaaaagagggtatcattttcaggaacatgaaatcttaagcttcatatcccagctgtgctctgccctctccttccttcatgcccataacatcatccaccgggatgtcacgccggagaacctgctgatctccacggacaatgtgctcaaattgatcgactttggaatatcccgaagcaaaaaggagggccagagccaggataccactatccttggcacggtcggatacgcggctccggagcagtttggcttcgggcagacggatgagcgaaccgatatctatgccacaggcgtcctgcttaacgtcctgctgaccggcagccttcccaaggatgatctgcctttcgatcctcgttaccgccagatcgtcttaaagtgtaccagcatatcccctgcggaccgttattcctccgtatccgaattaaagagccagatcatggccataaagccaacgcggatataccaggcggaaatcgtagagccgtcggggaaagcgccgcgaaaagactctctgatccgccgctttttccgccatgtaccgggatttcgtaccggcaatccgggaaagatgatcgtggccatcatcggctacttcctgatgctcctcttcgttgtcgtgaatggcacccgtcctctggagccaggagatatccgctcagagtattggaccatcaattatttctttgtcggcgtctgggcggcatacgtgaacctgggcaattactgcggccacatagaagcctatgataaggtagggcctctcaccaggcttctgctgcggacggccgtcgccctggcagtcttccttaccaccggccttctcctttattttgaaaactattgcctgaaataaaatgttccccttgtatgctcgatgcataccaaagaaaaaagggacttctgtatattatgtacagaggtcctttttgctatttatcattataacttaatagaagcttcgtcagattgaccacaagttcctgctctttgggggtggcttctgacaaaaggccggtccatatgtctttgtaaggcacctggtcctggatgatagattcctgaagaagatagtctaccgtaacgcccaggcagtttgtaatattaatcaggctgtccagcgtcagtttccgttctcctctttcaatctgtccgatataagacgtggaaagattcacctcttcggccaaccgttcctgggtcatattcaattttaaacgttcttcttttattcttcttcctagggcaatataatccatacgctattcctcacattctattataagcaattttacaatgattgcaccatagttttaatatgctattagcgctatttatattctctattagttgtattttgatatgcaaaatgttatactttaaaaaagaaattttagtaaaagagagggaattcattatgaaaaagagattgttaaccgtattgcttgtagcatccatgtgcctgtgcctgaccgcctgcggcgggtcttccgacgataagaaggataacaagaagacagaggatacggatgccaagaaagatgacaagaaagatgacaaaaaggatgaagagcctgatgacggaatcatcaacttcgatggcaaggattataatgtgacttactcaaggcacgaggtgggcaccgactatgaaggcaacccctgcctgttctactactacaacttcaccaacaataagagcgaggcttccagcgtgatggccgtggctatgatcaaggctttccagaacggcgttcagtgtgacagcgcatacatcctggaagagaatgaggcgatcaacaattatatgaaggagatacagccaggcacatccctggaaatctgccagaccttcaaactggctgatatgtctgaagtaacgatagaagcatctgactttgtttcctttgacgacaagaaggacacccagatcatcacccttcaataatcatcgcccggatataataaaaccggcacgcaggttcttaacaacttcctgcgtgccggtcttttttacatcagcggggcaaccagcctcatcacctgtccggctatctttgtcagcatgctccggttcttcacttcaatcagcgtcaccttatggcatcgggccagcgtctgctggaaatcccgctcaatcttatccacttcggaattattatagataaatgccccgcactcaaaatgcagatacagactccggtaatccagattgatcgtgccaacggtggccgtgtcgtcatcggatacaaacaccttggcatggacgaagcccggcgtgtactcatagatctggacgccgccttcgatcaattccttataataggtctttgcaaccgcgaatgcataccatttatccggaatatggggcatgatgataatgacctcgattccgcttttcgccaccctggtgagggtagtgatcatctcattatccaaaatcaggtatggcgtcataatatgtacatacttcttcgcatggttcaggatatggaaatacacttcctccccaacattctcgttgtcaaatgggctatccgcatacgggatgacatagcccagttctcttcttaaccccggatacctgggcgtcaggtattttccatatccttctgcccgccgttcatccacgttccacatttccaggaacatcatggtcaggctctgtaccgcgtcccctttcagcatgatcgcggtgtctttccagtgtccgaaccggaccttctgattaatgtattcatcccccaggttgatgccgccggtatagcctactttgccatcgatcacgcagatcttcctgtggtcgcggttgttctgggtggtagacaagaagggcttaacgctgtttgccatcttgcacttgatgccataacgcgcgatctgttccggataattatagggcagcatggagatggcgcacatcccatcgtacatgaacctcacttccaccccttcccggaccttctcctttaagatgtccaggatagccccccacatatggccttcttctacaataaaatattccatgaagataaaccttcgggccttcttaagctcttctaccatcgattggaatttatactccccaagcgggaaatactttacctgcgtattgcggtaggtagggaaccccagctgatgcgacagatagtaggacagctgggcattggccgacttgctagcccatatggcgtccaccacatcctgatcctgctgcatgtagggcgctgtctccagcttcagcttgcccaggcggtccttcataaacctggttccgaactgcatcttgacatatatgtagaacaaggttccaattacgggaaaagccagcacgcacagcatccatgtcatcttaaaggccggattgccttcagagttgatgatgtatatcaatacgatgactcccaagatagtcagaatcccatagatataggtcatatattcttccaggtagaatgccattccaagaaagactcctgcctgaagaagaatcagcaaaaggatgatccccgtcctgctgaatacgatgcggaaaaacccttttttggcggttcccggcgcttcattcttactcatactttagcctctttcctttgctttttgcgaaaatatatcatacagtttatcacaaatttgggcgtatctcaactttcatgtattttatttcgatttttaaggaaaaatgatacgatatgtgctattataatcctatactataatcgaaaggagttataactatcatggcaaaatggtgtaaaaaattgttagggcttgctgccatcggcactgccgttgccggccttatctattactttaaaaagaatgatacatgcgaagatgatgaattctcagaggacttcgaggatgaggatttcgatctggacagcgatttaaagccagtatcggatcgtgaatatgttccattgacaccctccgcaaaccctgaagatggatcaggggaagaagataaagaggttccaaaagaggaagaagctccaaaagaagaagcagatgcctcccaggcagccaaagacgatgatgaggatgatgaatagccgtaattataaggcaagggcgggaaactctgaggattcccgcccttctttcatgtacattcctattcgatccagcagtctctaagcagccttgccgcttctctgatctgatcttccgtaaggttggcatacccaagcagtatggttgccttctcctcgcagttctccctgatccggtaatcggacagtccatatacgcggatatccgctcgtgccgcccggtcaatcagttcctcctcggccatcccgttttgaaaggtaagaagcagatgcacgccggcattctcccctgatatggtacagatatctgccattggacgcagttcttcgatcaggacatcatgcctgcttttataaagcgctcttgtcttgttcagatgcctttcataatacccttcttcaatgaacttctgcacgatcagctgatctactttggaaacggtagaattgacaaacctggccttctgctcatatgcctccagtaatggcttgggcaggaccatatagctaagacggatcgccggggcaatggatttggaaaatgtgcccaggtatatgactttatcgctggcatcataacctttgagggcaggaatcggctttcctttgtaccggaactcgctgtcatagtcatcttccacgatataccttccctgttcctcgcaggcccacttaagcaattccatccggcggcggatgggcatgataactccagtaggatactgatgggaaggcgtcacataggcaatgtcggcgcctgacttttcaagttctgtcaccttcatcccattcttgtccatggaaaccggtatgcggttataagacatgccccctgccatccggtaggcctgcttataagtaggatcttcgaatgcaatggtatggtccattcccagaatcattcccagcagcatcagaatataatcgcttcctgcccctacaatgatctgatccggcgtacaatccactccccttgcctgatagaggtaactgcagatggcgctgcggaagccgtactcgccctgggaatcaccggaccggaataattccgtccggtcatccaacaggatatcctttgacagcttcctccacacattatagggaaaacttttcaaatccacgccattgggcgtaaaatcatagcggtatctgcgggcttccttcctttccctctggggctgcggcttatccttcttcagatgatacagttcgtcaatctgggccacaaaaaatcccttataaggaacagactcgatatatccctccgacagaagctgctcataggccagttctaccgtgctcctgcttacctccaagtgcttcgacaggaatctggtggacggcagcttctctccataaggaatccttccgctctggatatccgtcttaatataatcatagatctgttcgtacagggggatcctggaacgggtatccaggctgatcgtcaattcattcataattcctcttatttcggcagtttaaaggaactcttcagagatacgattcggttgaataccagcgcatctggtgcggagtccttggaatcgatgcagaagtagccgtttctcacgaactggaagctgtcacaggccccggcatccgcgaagctgtcctctacatagcaattattgagaatcttcagggaatccggattcaggttcaaagatccatcctccttgttatatacgcccttctcctcatcgatcaggttctcatacagccttacttgagcctgctttgcataaggcgcggccacccagtggatcgtgccctttaccttccgtccggtaaatccggatccgcatttagtctctggatcgtaggttgcatggacgaccgtcacgttgccattttcatccgtctcatatccttcgcatttgacaaaatatgcatgcatcagacgcacttcgttgccggggaagaggcggaaatacttcttcggaggctcgatcatgaaatcctcccgctcaatatacagttcacggcagaagggaaccttgcgcattccaagttccggattctccatattgttgtccacttccagatactccacttccccttccgggtaattatcaatcaccagtttgatggggtcaagaacggccatcattcggggcttcttcagcttcaggtcctcccggatgcagtattcaagcatggcataatccacggaactctggcttttggatacgccgcacatatccacgaacatcttgatggattccggcgtaaatccccgccgccttaaagccgcgatggatacaagcctgggatcgtcccagccatctacgatgccatcctgcaccagtttcttaatgtagcgctttccggtcaccacattggtcagatacagttttgaaaactcgatctgcctaggcgccggatcaaactcgcattccctgactacccagtcgtacagaggcctgtgatcctcgaattccagagtgcagatggaatgggtgatcttctccatcgcgtcctcaattggatgggcaaagtcgtacatcggatagatgcaccatttatcccctgtattgtggtgggacatatgggcaacccggtagatgacgggatctctcatattaatattcggagatgccatatctatcctggcccgaagcaccctcttgccgtcctggcacaggccttctttcatctcttcaaacaactgcaggttctcttctacggaccggtccctgtatgggctgttctttccaggctccgtcagggtcccccgataggcgcggatttcttccgcgctcaagtcgcagacataggcctttcccttcttgatcagttttatggcgcattgatacatcatatcgaaatagtcggatgcaaagtacaggtgatccttccagtctgccccaagccatttcacatcttccttgatcgactctacaaactccatatcttctttggtcgggttcgtatcgtcaaatcttaaatggaaggttccattatatttctttgcgagcccatagttcaaaagaatagacttggcatgtccgatgtgaaggtatccgttaggctccggcgggaatctggtgcatacttgcgtatagactccttctgccagatccttatctatttcctgctcgataaaatttttggaaactgtttcttcttgcatgtttttcctccttataggtacttacattctgccccctatattatcataaataatgtagcgaaacaaggcgttacagacgttttttaagcagcgtgaaggcctgtacgattatcgacgcgtggtcaacggcgatcagcctcggctaaatcactttgaatttcttatcccggatcagcccgcatcctgcctcttcctctaccagcgcttcggtcttaaagacccgctcctcgttttccactttcaggctgtacgtgttccataccctaccgtctttttggacagacttcaggcgctcaaggcttacgccgcacccgttcataatccccgtaattggcaatctgctccatgacaacaccctttacgccggtctcttcttctaattctcgcatggccgtatcttccagattctcccgcaagtcgataaagcctcccggcagcgcccacagcccgatgcttggatggtttccacggaattcctccgaaatacacttgaagataagtgaccgcctgcccgaatacctcccccggcgtccccatggccctaaggattgccggagccagaaggatgcccgctgcggtcaggatgatccctgctcccatcgcgatcgcaatcatcgtatggactgccttccttacgccctccttatcccgggcaccgaaaaattgggagatgacgacgccggcgccggcagacgcgccaatgcagaatcagcggaatggaaaaaaacagtatcttccgccaaattttttcatgctttttttcctttgtaaatatctttccttacgattcgcctcttttgaagcaaaaaaagactttcagaagatgtaatctcctgcaagcctttgaatatcaagctgccgagcggaatcgaaccgccgacctccgccttaccaaggcgacgctctaccgactgagccacggcagcatgcatatgtgatatgcaacgttaataatatacaatatattgggtagatttgtcaatatcctttcgacgattttccaacttttatttttccagttccttttccagtatcttctccgtcttgttcttaatccgctggagcgcattgtcaatcgtcttggggctcttgtccaggagttttgcaattgtcttataatcggtacccagaagatgcaggtacagcacccggttctccagggcgctgagattctcttccagcttgctttccagcagcatggcatattccctgctgaccaacagttcctccgggttgctctcgcctcctgcttccatggtctcaatcaaggataccttctcatcattcttctcatagagagagatataagtgttcaaaggactgtgctttttccgcttagatgcctcgatggccgaatacatctgacgggtaatgcagagttttgcaaaactgtaaaacgacgtctcctgtcgcacatcataatcctgcacagccttaaaaaggccgatcatgccctcctggatcaggtcgtcattctctccgcccagcaggtacatggcgttcgcttctttccgtaccaggttcttatatttttccatgacatagtcgatcacggtcttgtccccgtcacggagcctgcagatcaactgctcgtccgtcatctgctcgaatttagccatacgtatcctctctttccagccaggaatctctactttcttctctgtctgacgatctcataggccagtacgcctgccgccaccgatgcgttcagggagtcgatgtccccattcatcggaatacgggcggtgaagtcgcaggtttccttcactaggcggctgacgccctcgccctcattgcctattatcaggccgatggggccggtcaggttcagatcgtacatttcctccccgcccatatccgcgcagacaaaccatagccccttttccttcagggattccatcgtcttggccagattggtcaccttggccaccggcgtatagttaagcgcgcctgcgcttgtctttgccaccgtggctgtaagcccgaccgcacggcgcttcggaatgatgactccatgggcgcctgccagattagccgtacggatgatagcgcccagattatgagggtcctcgatattgtccagcaggatcagaaacggatcctcccccttgctttctgctaatttaagcatatcctccacatccgcgtactcgtaggccgccgcataggcgataactccctgatgtcttcctgtctcggatatctgggacagcctttctttggtgacgaactgaagtatggtatcatgctttttggcttcccggacaatcgtcctgatcggcccgtcctggcatccatccagcacaaagagtttgtcaatgggcttgccggagcggaatgcctccaacaccgcattgcgcccttctatgatattttcatttatttgcttgtcttctttcattcttagaactccttatatacattcatccatgctctctaatcctattttaaccagttccagcattcttttccactcttttttcaaatatagataccccatcagcgcttcaaagccggtagccctccggtaatctgtgatggactggttcttggccggcgacacgcttttggcgtttcttccccttttaaagaccgcatgctcctcttccgtcagatgctcctgaatggcgcgcatcatcttagactgggcggatgcctgaaccctcatgctggtctccttgtgaagtttctgtacctgcctgttaccttcattgactaccagcgacttgatgatcaggtcatagatgctatccccgatatatgctaaagtaagaggtgaatattccttaatatccacctctttcatctggaacagttcctgcatataagtgtcaaactcccactttacgcttttttccattttaccccttctcttgtgtcttccagcacaatgccttttgccagcaattcatccctgatcgcgtctgcccttgcaaaatcctttgccttgcgggctgcctggcgctcttctatcatcttctcgatatcctcggccagcatttcttccttcttatccacgatcaatcccagcacgtctgtcagcttcaccagaagatcgaagaggttctgaaggaactccttggacttatcggcatccgccgtcgtattaatatatttgaccaggtcgaacacggacgcgatggcatctgccgtgttaaaatcatcatccattgcccgttcaaattcctgcacatattccgccgtctttgcaaatgccgcttcttcttcctgcgtcatagactctgacttggcatttccaagtagaaacttcaggttgtcagcagcattgacaatccgctccaggccgctcttggacgcttccatcagatcagcgctgaaattcagcgggcttctgtaatgggcgctcagcatgaagaatctcaggatctgaagatcatactgctggctgatctcccgcacggtgcggaagttgcccagtgatttgctcatcttgcggttgtctatattcaggaatgcgttatgcatccagtatttcgcgaattccttgccattagcagcctcgctctgggcgatctcgttttcatggtgagggaataccaggtcttccccgcctgcgtggatatcaatctgctcgccaaggtatttcttggacatctccgagcactcgatgtgccatcccggacggccatcgctccatggagactcccatgcaggctccccttccttctttggcttccacaatacgaagtccaatggatcttccttctcatcctcgcctgttaccagaagggaacgctctcccgaacgcaggtcatccagattcttgtgggacagtttgccatattcttcaaatttcctggtgcgatagtatacggtgccgttcttctcataggcatatcctttgtcaatcaaggtctggatcatgtcaaccatgccgcagatctcttccgtagccaggggattcttggtggccggtttaatattcatgccatccatatccttcttgcattccgcgatataacgcttggaaatctcatcggaagataccccttcttcgatcgcccttttgataatcttgtcatctacatccgtaaagttggaaacataatttacatcgtagcctttgtattcaaaatatctcctcaccgtatcaaatacgatcatgggccttgcatttccgatgtgaatgaagttatatacggtaggcccgcatacgtacatctttacctttccttcctccaaaggcacgaattcttccttctgcttggacagcgtgttatacagcttcatatctactttcttcctccttgtctaatacttctatattttcctctttcatgcacttcatacgtctttccatctcctgaagcctggtgtgcagcctgatattgtctgcctgcagttcccggatgtcattgctgatcggatccggaagatggatctgatccatgtcaagccttgggatcttctgatcgcccatcttcacgattcttcccggaactcccaccaccgtacagttggggggaacctctttgagcactacgcttcctgcgccgatcttcgagttttcccaaatggtaaaggaccccaggactttggctcccgcgcttaccatcacattgtccttaagagtcgggtgccgcttcccctgttcctttcccgttccaccaagggtgactccctgatacaaggtgacattgtcccctatttctgcggtctctccgatgatcacgccgcttccatggtcgataaaaaggcctctcccaatggtcgcgcccggatggatctcgatccctgtcttcctcaccgctcgctgggacacccaacgcgccaggaaataatgctttttcaaatataacttatgggccaccctgtaacgcaggatagccttgaagctgggatacaggaacacttccatattcgacttgatggccggatcccgttcccggatcacctgaatctcttccttgatgtaggatatcatgcccataaaaccctctccttctaatcatagggaactttgttccccattgcataaaaaaaactccgtctcttatgcaagagacggagtatatccgcggttccactcttatagaggacattcgtgcacaaaaacatcctccaccttggtacacgtaacgtgtgtaatcccgtacctggctacttgccgcacgcgttcgccaaatcgactcccggatgcacttcacagatacttcccttaaaactgctttcagccggtgacagtttctctctttcagttccatagcctgctactctttccgttcagcgtcttttttctgtataggatatataatatgtgaaaacgtaatatttgtcaacacaattttcttaaggcatggccttatatttattttaatcggaaccgcagttctgccttgaacaggtctgcctctgtcgttatcttaagctttccgccctgcaattctgtaaaactcttgacgatcgcaaggcccaggccgctgccttccgtattccttgcagagtctccccgcacgaagcgttctgtgatctcttctgaatcaaaattcagttccgcagccgagatattcttcatccttacgaccgcttcctggccttcctggccgatttctatatagacccttgtattcggcatggaatatttgatgatattagccagcagattttcaaaaatccggtaggtcttctggctgtccagcggggcgatcagtttctccttgggataggcacaacgcaattccagtcctgcctcctgaatcttatcttccagttccagcttcacctgcttaaacaggttggacacgtctatgtccatgatatccagcgtgacattcttgctgctggccttgctgatctcgaaaagatcctcgatcagcaccttcagccggagggactttctctccagaacctgaatataatcctggcgcttttcctcgtccttttcttccttcagaagattgacgtaggttatgatcgccgtcagcggagtcttcaggtcatgggagacattggtgatcagttccgtcttcatgcgctggctctttacctcttcgtccaccgcttttttgaatcctgactggatcttctgtatctctgccttaaatgggttgaatacgcccagatcgtcggtaatgctggcatccagatttccttccgcgatctcgttggtagactgaagcagcaacgcatacttttccttcaaatcattaaaatatttcctcagtacgaagaacagcagcaccgaatagatgatcagcgccatgattccaaagaaccacatcgagcagatgaacacaagaatcacaaagttgcaagcaacaatcttcaatatagtcctgttattcttctcgctgaaatcaatgttatcgaaggagtggtaaagtcgatccagccatcccttcaccttgcccgctatccaatgccatccccgcttgatatatttccaagatggaacgaggaaggtgcgttccttcacataacgttttcctccaagggcgaacacctggcggaggcatcccgccgtccagtatacgatgccgaatatcacgatccagcacagtacatcgataaacatcacgcggccttcatttctgataaacatgtagccgcagttgttgccaagcgttgcggccatcatgccaaatacgatcgctactgcctcaaaaggcgccctgaacaccaattcattccctgtatttaaagatttaagaaatgggtacagaaaagctgctatcgctacggctgccataaggatcgtaatcaggcttactgcctctcccggcgtatagaagccgctgtagtattcattatccatatatttatcaatattttcttcggtcattgcgtagatataggttctgttcttcggtctttccagatcatgctcgttttcaagcctggaaaaaatattgtcatacttggaatcgtccatatttccgatcactttacgcagctcgatgctctgatcctccttgtattccccctttgcaatcttggcatcaatggtaccattcttatcataggtgatcacaattccaagcgcataagaggaaagcgtcttatctgtcaggctggttccggaatttgccgtgctttttgtcactagtttcccgtcctcgtcttccacccggtagtcaagatacgggtacagttcttcaaaatcgtacaaaaatgtcggctcattttcctccagcatttctttgacttcttctgccgtatcttctccgtcttcctcactgttctccgtattatagagaagatacccggctcctatgaatttctccatgaaattgctggaacagacggctgatttgtctatgctttcctggcccttcgcggtctgcctgtagtatcttggatattgctgtatcacagccattgcaggcacaaatatggttaatgcaatcagtatgactgcaagtttatgcttgtttttcaattttgtatccaactccccacaccaccttcaaatattttggctctttcggattgatttctattttctcacggatatttcttacatggaccataatggtatccgtatttaccgcccgctcattccacacgcgctcgtagatctcctccgcggagaacactcttcccggattcttcatcagaagcagcagtatcttgtactccataggcgtcatctttaccgactcgccatccaccgtcacctctaccgtatcttcattaatctcaaggccccctatagtatagacgcttgaggaggcttccctctggttcagcttctcggcaaacttgcggtagcgcctcagttgggaattgacccttgccagcagttccatcggggtaaacggcttggtcacatagtcgtcggctcccatattaagtcccatgatcttatccacttcttctgatttggcggacaggaaaattaccggaaagtcgtacttttccctaagcttgatcgtcatctggatgccgtccatccttggcatcatcacatccacgatagccagatggatctcttccttctcgattatcttcagcccttccactccatccgccgcctgaaacacctggtatccctggctcttcagatatatctccacaccttcgcgtatctccttgtcatcttctactatcagcacatgattcatttccatctctttatatattcctttccctgtcttttcagtcgtctattccagcacgcctgctgccattatactacattcggactctttctggtatacccttatcctaggtgccttctgacaggaggcaacgtcatagtcgtcgaagcggaccgtgatccgggaaaacggaagcggaatacggtagtggtcccagcgatttcgaagggagatctttctggagtaagacagggtgactccggtgagccttgcattactcttttctgacaggaaatatatcagtttctttggaatatgccttggtcccagcgggccatccatggcgatcgccacgctcctcgtatcattttccatagactttagtatctccttaagcgtgcccgcgttgcaaaaaccatagccgatccttaccgcgtccccgccagccttttccagaaggtactggacatattcccctctttcatctgcggtcaccaggacagagacctcccctccctgacgggaaatatgcgatagcaccaggttcatcgcaaaactgtcctcatgccagaaccctacgatattatggaaagtaaactgctccggctgctgatactggatgcgcaccgttttctcaagacactttaaatagccgtagaaaagacgacacagtatggcccttttcatagatctggctttctccatatccatatttttcttctctcctttctaataccctgcggtaattctcttctgcctgggcagcaatataactcatccggtaattttccgccttcttcttcgcctctatcttaagcctcgccatattatccggatcggatagcatcccggcaacgcaagaagcaaattccttctcatcttcttttgccagatatccattgcatccgtcgcttacgatgtcatcgactccgcaggcgcttatggctgccaccgggagaccggaagccatggcttctgccagcacgattccctgggtctcggactttgaggcaaatacaaaggcatcgcaggcctgcagatagttcctgacttcatcgttgggaatctggcctatgaaacttaccacgtcctcgattcctaactccttaacgtaggctgcaatccctgcccgctccgctccatcgcccactaccaccagccggacattcccttctgtctgcgactttaactggtacatgcagcgcatcaggaagtacaggttcttctccttatccagccgcgacaccgtgcatagaagatgttctcctccacctaaataccgtttcctgatggcctccgcctgttccttatcttcttcaaaggattcctttgcaagccctgtaggaagaaccctgaccggcgtcttgatcttctgccctctcagatagtccgccattcctctcgacggcgcaataaccatatcgcaacgcttcatgtagttggccatataatagggcagcatcttctttccctgcctgaggatatggcccttgatcgcctcctgaccgctttcttccgaaaaaagtttaatataatgcagatactcttcatatctcgtatggtaggtatataccagcggaatcttatacttccggctaaggtggacagccacatttccgatcagcataggctgatgcacatggatcaggtcaaattggcgccaccggaattcctgattgatgcgggcatccaggatattggggatagccattccgttcttcatccttttttcacaggagcggtaccgtatgacatcctcctcccagtattcgtcctcatattccggggcgaatatgcacacttcatgtcctcttttgcgcaaactctgcgaaagacgctcaacggatatgggaacgcctcctataaaaggcttgtaattgtttgtcatcattgcgatcttcatgtcgattcctcccattctcatctatttctataaatccctatcactccctaagtcagaagattccatacagaatcccccagaaaatatccggctccgataaacaccagattccacagcaccactcccatcagcgaactgatcgtatacttggcaaaatccatggagatcatacccgccggaatggaaaccaacgtcctgaccattggaagaagcttgctgacaaacacgcctatcggcccctttcgccgcagaacatcaatatttttctccagaagttccctgtgctttgggaacttctttatataaaaccggaagaatgcgtctccgcccagccttccgagaaaatataaaatccagctgccgagcagacccgccgcggctgacaacgccatcaccgtcaggaaaccaatctgcccccgcgccgcccatatgcctgccagcggcatgattatgccggccgggaagcccgggagattcatatattccagcagaacgatcacaaacacgaatatggcgccatactgcgtaaaatactgtgtaagttcctgtattcccatctgtagtaccttcctttttcctgatgttataagcatacccgggaattcttaagagacccgccaggaaaatctaaagatattctaaagatgacacgtaacatttttcacttttgcacgtaacatttttcaaaagtgttacgtgcaaccattacacaacaggtgcgtaaaattgacataactcctgtgcaaaatgaaaaagccctgcccctaaatggaacaacgcctttttcttatatatacggtcagcatgtcaaaacgaaaagtaacattttccccggcatgctgccttctatattatttttttatttttcacaccactatttgcaattttacacaagagtttgtacaagattacacaccagttagataagttggacacgtaacatttttcacttttacacgtaacacttttgataagtgttacgtgtcacaccacctcacgtatcacaccacctcattcagatatatcttcgacaggggaattattttttttaattcttctttcatccgctccgacatctgcacgtctttttcctggcatgcttcatccactgtctttgctccgaatatgaggcttgcaagtgctgctatggtaatggttccttcgctattttccggctttccttccatcagcatgacgccggagaactctgtgccggtcaagagcaggtaacgattattttcttctaaaatggggtctgtcacctgaaagcagacgcccataagggatctgaggcttaatgacatcaagatcctgcggacatctacaatcctaatcataatcttaggaggtccttctaatacttcttcctcttctgctactttttcccctcccggaatgcatatcttacaattcacaatcccgccgtccttgcggaaaattatgatgcctcctccatcgcttttatactcctttaaaagcctctggtaataggcttcatcccggatcgcaaagacctggaaatgttctgccagatacttattggcaaattccgccagttccttgcagtctgcgtccgtggcctctttaatgcaaatgtcttccgaaggctcttcctggcgataatatcgtttcttttgctcatataccgtccgaaagtcaaagggcagatagatgctttctgacgccggcatcaaaaatgtgaaggcttctcccgcctgatacatatcttcaagggattttttaagaagcgatgccatataccctctcttccggtattctttctgagtagcaacggcaacaatataattagcatctttcctgctcccattcacccacaaagaatagggattcagatgcagcatcgaacgaatccttccatcttcttctatcacatatatctggttatcttttgttttctctgtataataatattctacaaacctcgcactatcctcgctgaatacttcttcatataacgattggcttgcctgatgttcctgaagttccaacttgcgtaatctcattttttcaccttcaaatattttaaatcaatttattcaaatgtcctatcctcgttatttcaaagttcgtctaatcagccggccttttccgcttattttacacatgagggcagccaacctctacaactcctatcttgcataagggcagccgatccgtgcaacttctatcttgcatgaggacagccgccgcatccggcgcatcttccctcttcgggtccaacagcataactatagttggcaatttcttccaggcttgcgatggcctgggcggatattccctcgccactgccggtaaagcccagcccttcttcggtggttgccttgatatttacctggtcgatatcgatatgcagcacatttgccacatttgctctcatcgcttcaatataaggagccatctttgggcgctggacaatgatggttgcatcaatatttccaattacataaagtttatcttctactaacttccccacgtgcttcaaaagtttcatgctggatgcccctttgtattcagggtctgtatcgggaaaatgccgccctatatctccaagtgccgctgcccccagaagcgcatccataacggcatgcacaaggacatccgcatccgagtgccctaataaccctttatcataaggtatttccactcctccaagaatcagttttctgccctctgtcaacttatgaacatcgtatcccattccaacacgcatatcctaatcctcttttcccgaattatcctgctcgatagtctgctcttccccgcaagaatttattccatctgattcatccgatgtctcgctttcctttacggaaatattttccttttcctccacagaaacagtatcatctgacggctctgcatcttcttcagacgccccatcctcttctattgcgtccttaaacggatctctgtattcatgcttgatatacttcttcaggttaaacagacagcaggctgcgccaattattaaaaacagcacccctacgactgtatacagaatataattctccggtttttctttcatggcatccgtgacgagtcctccaccaagataggcaagatagccgcccgcaattaccatcagcataattcgccctttcgtttgcatatctatgttcctccttttgcttctttttcctatgtgtattgttttacatgcgactgacgcttttcttccacatgttttgtattatatatgatttgacattttttgtatagtgatgattgcataaaaagggcttgtcttaaaaattacaaaaaagaaaaagcctatgcttataggctttttctttcagtagcgggaactggatttgaaccagcgacaccacgggtatgaaccgtgtgctctagccaactgagctatcccgccatatgcaattttaggtatatatgggaccaatagggctcgaacctatgaccctctgcttgtaaggcagatgctctcccagctgagctatgatcccatatccttgcgggtccttatctcgaacccgctttgctattatactattgaaatccattaattgtcaacactttttttaatttttttacaaaatccgaaaataaattctatgtggtgcagaggatacgcctgtattaaacgattccctgagcgttcatagcctctacaaccttctcaaatcctgcaatattggcgccaatgacataatttccttctgcatcatagcgttttgcggcatctgccatattgtggcaaatatttaccatgatgccctgaagcttggagtctacttcttcaaaagaccagcttaaacgctcgctgttctgggacatttcaagagcggatgtggcaacgccgccggcattcgccgcctttcctggagcgaataatatgccattctgctgcagatattgcgttgcttccagcgttgtaggcatgtttgcgccttccgctactgcaatgcatccattctccaccagcatctttgcgtcttccagatgaagttcgttctgggttgcgcaaggaagggcaatgtcaacctttacagaccatacgccgcgtccttcatgatattctgaattcggacggtagttcttgtattccgtcaatcttgcacgcttcacttctttgatttctttcaatgcttctacgtcaattccatccggatcgtatacccatccattggaatcactgaccgtcactacttttgcgccaagctggaaagccttctgggtagcatagatcgcaacatttccggaaccggatacggcaaccgtctttcccgcaatatcatgcccattgatcttcagcatctcttttgtcaggtacaaaaggccgtatcctgttgcttctgtcctcgcaagagatccaccgtaacttaagccttttccggtaagcacgccttcatatacgccccggattctcttatattggccaaacatatagccgatctctctggcgcctgttccgatatctccagccggaacatccgtgtcagcgccaatatatttacaaagttctgtcataaaactctggcagaatgccattacttctctgtctgatttgcctttcggatcaaagtcggaaccgccttttccgcctccaataggaaggcctgtcaatgaattcttgaaaatctgctcgaaaccaaggaacttaatgattccaaggttgacagatgggtgaaggcgaaggcctcctttataaggtccgatcgcgctgttaaactgaacgcggtagcctgtgttcacctggacttgccccttgtcatctacccatggcacgcggaatttaaactgtctctccggctcgaccagtctctccagcagagcatcctttttgtatttttcttcattagcctctaccactactctcaatgattccaatacttcttttactgcctggtggaattccggctctgctggattctttgccactactttttccaggacttcatcaacatatgacatacttttctacctcctaaaacttaataacaaaacgggcagacaaagtctacccgcctgtacgatgcttttgtcctttaatattgtaaaggaattctatatagaacacaagaatttttttaaaaattttttccatttctgcaattttaaattcgttttcctgcaaacagatgatttttttgtgcagtttttcccacgcctatcgggagtatctgcaacaacacatcgaccatgtttcattttgcatctcttagcattctagacatcgtggtattttaagcatccaattatttaaagtacttgacaccggattcaaagatcttcagatcctgctctccataaatgttcatggctacggagcgggcacgtctctctgaatgggccatcttgccaaatacccggccatccggactcgtgattccttcgatcgcgcagtaggagccatttacattccattcctcatccatactgatatttccgtttagatcacaatactgagttgcaacctgcccatttgcaaaaagtctatcgatccattccttgctggccacgaatcttccttctccgtgggatgcaggattggtatatacgccgcctagttctgcctgtgcaagccatggggacttgttggtcactaccttggtatagaccatcttggaaatatggcggcctatggtattataagtcaaggtcggagactcctctgtctggccggtgatcgccccatttggaaccagcccaagcttaaccagagcctggaagccgttgcagacgcccagaaccagtccgtctctttcatcgagaagcttctctaccgcctccttcatctttgcattctggaatgcagtcgcaaagaacttggcagagccatccggctcgtcgcctgcgctgaatcctcctgggaacatgatcatctgcgcctggccgatcgctttctcgaatacgctgacagaatccaggatatccgttgcactcatattcttgaataccttggtgattacgttcgctcctgcccgttcaaatgcccttgcgctgtcatactcgcagttggttcccgggaataccggtatgaatacggttggctgggcgatcttatggctgcagatatggatatcggaagtctcatacaatcccctatcaatcttcttctcctgcccttctgcaccggaattggtggggaataccggttcaagcgtttccttccatgcacactctgcctcggcaaggctgatcttttcatttccgtaagagaatgtggcatcctccgtcacttctccgattaccgtatacgtaatgccaagttcccctaccttatctgccggcacttccgcgatgatatcgccaaaagcaggggcaaagagatctcttgcatctatattgtgctcgatctttacgcccattctgtttccaaaggccatcttgctcacagccgcgatgatgccgtgcctgtcgagggcataggctgccacaatcctgccgctgtgaatatcttccgtgaacttcgcatattgctccatcactttttcatatttgggaatatcgtactcgtccgtctcgatgctgagccaaaccagcttatttcctgcctgcttcagttccggcgtaatgatatccttttccgcagccacatccactgcaaatgataccagggtcggaggtacgtcgatatcctcaaacgttccagacatgctgtccttgccgccgatagacggaagcccgaatccaagctgggcattgtaggcgccgagaagtgctgcaaaaggctggctccatctgtgcggatcctctgtcatcctgcggaagtattcctggaatgtaaaacgaatcttcttgtggtctccgcctgctgccacgatcttagccacggattccgtcactgcatagatggccccgtggtatgggctccaggtagaaaggtaaggatcgaatccataactcatcatcgtcacagtgtcgcactctcccgtctgtatcggcagtttggcaaccatagcctgcgtctccgtcatctggtactttcctccatgaggcataaatacggaagacgccccgatagagccgtcgaacatctccacaaggcctttctgggagcatacgttcaggtctttcaatgtatcaagccatttttccttcacattctttacttcttctcttccaagaatgctgtccgcacgacttggaatatctacggcaacgctggtctcctggtgcgccccgttggtatccaggaaggcgcgggaaagattgacgatctctttgcctctccatgacagcacaagccttggctcctccgttactaccgcaactttggtagcctccaggttctcttcctttgcgtacgccatgaattcgtccacatctttcggatcaaccactaccgccatacgctcctgggactcggagatggcaatttccgttccgtccaggcccgcgtatttcttcggaaccttgtcaaggtctactctcaggccgtcagccagttccccgatcgccacggacacgccgcccgcgccgaagtcgttgcacttcttgatcagccgacttacttcttcccttcggaacagacgctggatcttacgctctgtaggcgggttgcccttctgtacttccgcgccgcaagtctcaatggactcttccgtatgtaccttggaagatccggtcgcgccgccgcagccgtcacgtcctgtacggccgcccagaaggatgatgatatcgtcgggatcagacgtctcccggatgaccgcacgtctcggcgctgctcccaggactgctcctatctccattctcttagccacataattcggatgatagatctcctttaccgctcctgtggcaagaccgatctgatttccataagaactgtatccgtgtgccgcctctcttaccagtttcttctgaggaagcttgcccttcatcgtgtcattgacggacacggtaggatctgccgcgcctgtcacgcgcattgcctggtatacataggtacgcccggacaacgggtcacggatcgctccgcccaggcaggttgccgctccgccgaaaggctcgatctccgttgggtggttgtgggtctcattcttaaagttcaccagccactcttcttccacgccgtctaccttgatcggcacgacgatactgcaggcattgatctcgtcagactcttcctgatcttccagcttgccttccttcttcagtttgcgcatcgccatcagggccagatccatcaggcacacgaacttgtcctccctgcctttgaatatctcgctgtggtcgcttaaatactgcttataggtatcttctatgggctccctgtaatcgccctcgccaaaagacacatccttaagctctgttgaaaacgtcgtgtggcggcaatgatcagaccaataggtgtccagcacgcggatctctgtcatagaaggatcacggtcctcttcctcgcggaaataattctgaatatgaagaaaatccttaaaggtcatggctagccccagcgagccatacagttccattaactgatcttttgccatgtctttgaatccctcaaagataatgacatcttccggctcgtcaaactttgtcaacagtgtctccggcttctcggtaccggtttcccgggagtccacaggattgatgcagtgctccttgatcgcttcgaactgtgcatccgtaatattcccttcaatcacataggtggtagccgtcttaatgacaggctgttcgtcttctttgataaactgcacgcactgtaccgcggaatccgcacgctggtcaaactgccccggaaggaactctacggaaaatatcctgcttcccggcgcactctggaactcctcttcatacagagtgtcaaccggcggttctgcaaatatgccgttgcatgctttcttaaaagtctcttcggagatattttccacatcatagcggatcaacacccggacattctgaatatccttaatccccagataactcttcaactcatgcttcagttcctccgcctgcaccgcaaatcctggcttcttctcgacgtacactcgttttacattgctcataaatcttcctccatccatgaattttacgcttttatggttctattgtatcatatgttttgttattaattaaattaatataacttaaccttcttataatctatgcttattattatccttcattgccaccctccatatacggaagattccccacagaatcatcagcatgacaatgaaggcaattcctatccgtagtaccatatccgaaaagaatccttccggaagcatccgtatcatatagtctgtagctgaatcaaacatccaaaggtcattggtaaagaatatttcatggaaaatagtaaagcactttgtaaaatctatggcaaacgcaattcccaagaaggcaacaatggctagaaatatgacaagggcagccgaatatgccctgggtatcagcactttccagtccgcattcgtcagaatcaggagtgccagaaggaccagcgccagcataaggcaggcagtcctaaccttaagccctccaagaaacagatttcttacgtccgccatatgaagcctgtcctgctcattgaagaaatccttcttctcgccttccaccgtggttatcacggacagttcctcctcctcgccgatcagatatgccatcatatgctccgtcacccgcatgacatcattcatcttcattccaagcgtatcgcaaactgtatacttttcatactccttctgataaaacttatactccgagtccccataaataaccagctggaaactggtgatcaataccgatataatgataagcagcatggccgccgctgccatcaattgctgtgtttttttcatgtcttgactcctccacccccattctatcataataggagttgtaattcactcccttttggcttataatacttagtaattttataaggaggacttatgatggatgttaattatgaattatataaagtattctactttgtagccacaaccctcagtttttcagaagcttccaagcagctgttcatttcccagtcagcggtcagccagtccatcaaggctttggagaagaaactggaccagactttgttcatccgcagcaccaaaagggtacgcctgacccctgaaggggagattctgctgcgccatgtggagccggcgatgaacctgatcaagcggggagaggcgcagttgatggaaaccaattccaaaggcggacagataaggatcggggcgagcgacaccatctgccggtacttcctggtaccctatctggaaagattccacaaggaatttcccggcgcccatatcaaggtcaccaatgccacctccatccgctgcgtggaactgctggaaagcggccaggtggatctgatcgtagtcaactaccccaatccttacctgggaaatattaccggtgtcagaaagatccggaaattcagggatgtcttcctcgccaatgagtctttcgccgaactcaaaggcatgaaactggatctggaccagctgcttaagtatcctatcctcatgctggataaacggagcaccaccagcgaattccttcattccctgttccagcagcgccaactggatttggtgccggagatcgagttaagcagcaatgacctgctaattgatcttgccagcatcggcctggggatcgccttcattcctgattactgcctgcaaagaaaaagtgacagcctctttatcgttgagactagcgaggaacttccctcccgtgaattggtcattgcctacaatgaacagattccggcctccaaggccaccttggaattcttaaactcctttcccggggcaaagctttcttagcaaactggctgtttttgggagggctcaggccttgtccatcccatcccagaacgtttcgatcatcccggtcacgttcctggcattgcaccatccatactggctccattcccgggggaaggtctcctgataccttccgtcccggaaccgctcatccagaagcaggatgataccgcagtcctgatcggtccgtatgacccttccagcagactgcaggaccttgttcatgcctggatagagataggcatagtcgaatcctcttagcccgtgggaatcaaaatatgttttcagcagttcccgctccctgcatacctggggcagtcctgtccctacgataatggctccgatcagcttgtccatagccagatcgatgccttctgaaaagatgccgcccatcacgcagaagcccatcaggctattgtctttgtcttcctcaaaattctctaggaatatctcccttgcctcctccgacatatacctggactgcatcacatactcaatcttacggcccccgtagcagggtacgctctccagcaaagatacaaaaactccatagacctcttccataaaatagtaggaaggaaaaaaggcaatatagtttcctttcctgcttcttgctacctggatcagatattcggcataccgccggtacatttcctctccacggcttgtatacttggtgctgacatccgtgccgatcagcagaaggcgcttccttgcgtcaaaaggagactctgcatagatggcgtaatcctccttcgaattgctcaaaagtttcttataatagtggatagggagcagcgttgcggagaagaatacggtgctgtttcccctatccaggaactgggcgaggcagttggccgggttcacgcagaacagacgcagtttgaaccttccatcctcctccagttccgaatagatcagataattctcatccagtccctcatgaatgttcgcaaacatacgtacggcaaaatataattccagcacttccttgcgtatctcctcgttgcggcactcttccaagtaacgttccatctccgtcatcagcgcaagcagtttcaggtagatatgggctacgctgtccagtatctggtaatcctcgcactcccgcttcagcgccagaagctgcttgttgcactcatccagccggctggccagtctgctgtcctcggcttttaccagacgcttgatcttaaggaaatcctctttatagatgctggcgctgtacatctccctcccccgttccaccagattatgagcctcgtcgatcaggaacagatactcgcctttatttccctcgccgaaaaaccgcttcaagtgcgcattgggatcaaaaacataattatagtcgcagatgattgcatccacccacagcgacacgtccagccccatctcgaacgggcacacgttccattttctcgcctgttcttctatcacctcccggctcatctcatctgtggaggccagcagttcatacaccgcgtcattcaccctgtcaaaatgccccttggcgtaagggcagtcatccggattgcagtttgtctcctcgcagaagcagatcttctccttggcggtgagcacgatcactttcatgcgcagatcctgggctttcagggagtcaaatgcctgccacgccaccgttctggtaatcgtcttggccgtcaggtagaatatcttctctcccagcccttcccccatggcttttacagccgggaacaccgtggagatcgtctttcccactcctgtaggggcctgtacgaacaactttttcttgcgaaggatggtgcggtagacgctggtgaccagctccttttgtccctcccggtaagaaaagggaaattccacctgccgtatggatgcattccgcttcttcctccactcaatctgataacgggcccatctctcataagaagctgtcagttcctgaaaccaggcttccagttcctcgaaggcatatgtgctttgaaatcgcttgatctcctccgtctccatattacagtaggtcatctgcacgccaatctcctccaggccattctgcctggcatagatataggcgtagcactttgcctgggccagatgcaccaggatgggctctttcaatgtatccagttccttgaagctccccttgatctcgtccaccacgggtccctgcggcgtatccatgattccgtctgcacgcccctctatcagcagcaggaatccattgcaggcaacctcctgcttcagggagacctctgcatgatagtcagcacccatctgccgctggatcttccggtggatcttgcctccaagcagcatggcgtccttgtcagtccctgctattctattgtcaatatcgccgccgcgcagtataaattccaccaggctgcgcacggagatccgaatcactggctgttccaaatccatagtccttttcgtccttcatctacatttcttcctattgtatcatagattttccttctgtcgcagcctaattcgtaaattccaccatattggggcgaaaccgcaagggcaggtgctgcagctggcaccttctgttggtgcgggattctatggctatagtcttgcagaagtccttccacaatctggaataccgggcttccttttccgacacttcaaggctccccttcctatccagcatatcgtcccatatcagaatccatttcttctttgcctcatgcaccacgaacatgtcatggctcttgtcatgaatcatccagttctccagtggcagacggtccgcaaaatgaggagccaggcaggtaagcacctgggacttgggcgtaatctgcgcgtacaggacgccgttttttaattcctggaatctcaggaagcctttcagcgcatgagcctcccctcccacggtacggctcagttcaaataccttctccaccttaggatggcttaagtgctccatgatcctggtgctgtcgggaagcgtccttgccgccagcatggtgccaaggatcgcgtcccccttgtctttatccgccgccagcacggcatgatagatgtcccagtatgcctgtcttcccagatgcttcttgatcaaattctccacggcgatcgctttatgctccgtctcttccacttccacatagtcgcagaacagctgctgctccagcatcccacgaagggcgatggcgcagtctgcttccccccggcctgtcttccaggcatcatagatgccggagaatatccccgtcaccgtatcgctacacacatagaccgtcttcatagaacttccctccgaaccttacatcgtcgaacagggacagctgccgataactcatgccgtcaatcccttccggcagcctctccctcgcattcagcagatttctcgtaatatagtcttcctcaatcttggtcggatacatcatctttccgccgcaagtgataaaatacagcgcccgcttaagcactacgcccatcttctttatatcctggaagttaaggttccccaatctcctggccttgacaatccgggtggccgacttatagccgatccccggcacccgcagaagcatcttatagtctgcccggttgatctccaccggaaaatactccagatgcttcagcgcccagttgcacttgggatcaaacagcacgttgaagttcggcgattcctccgacagcagctcgtccgcctgaaaatggtagtaccgcagcagccagtccgcctgatacagccggtgctccctaagaagcggcggcccctcgtccgtacgcgcgggtagcgtggcatcctcattcacatggacaaaagccgagaaaaacactctttttaactcaaacttctgatagagggcctccgtcacctgcatgatctggtagtccgtctcaggggtcgccccgatgatcatctgggtactctgccctgccggaacgaacctgggcgcattgcggtatacctggatctcctgccggttctgggccgccttgctctgcaccaggcgcatgggggccaggatattcttcctgctcttatgaggcgcaagaagtctcaggctctctgccgtaggaagttccaggttgacgctcatccgatccgccagaaacccgatcctgtgcaccagttcctggttggcgcccggaatggcctttacatggatgtagccctggaaattgcattccctgcgcagcttatacaacgtggcataaatcagttccatcgtatagtccgggctattcagaataccggaacttaggaacagcccctcgatataattgcgcctgtagaactccatggtaagcgtgcacacttcatccggcgtaaaagatgcgcgcctgacatcattggtcctcctgttgatgcagtatttgcagtcatagatgcattcattggtataaagaatcttaagaagagagatgcaccttccatccgccgagaaactatggcagattccggtctgctcgcagctgcccatgccggtcccgtcattggccctggcagtcccgctggaagtgcaggccacgtcatacttagcagcgtccgtcagaatattcagtttctcgtacatcgtcatggactcttggatcctcataatcatccgcctttcataaaacgcagtaagaacatacgtttgttttctaccattatacaaacatatgttctttctgtcaataggactcctatgctaatattcagcctcatatagcggctttaccacttctgtcaggtcgctgatcacggagatcagcgtctgcatatccttatcccggttcctttggaacgcatgatacccgccctgtatgcagtagcttagaataatattcctgaccctgtccttacggtactccggatgctttctgaatatcatttccttgatgctggtctcgatcctgtccgcgagatgattcctctggcttccggaaaaaagtatggtgatcagcgaattctgggacagataggccagaaataattcccttgtgaattctgccggattctccataatatattccggatgcgagatgctattggtaatggaggagacgacttcctcttccatccgctccgacaagtcatagatatccttataatgagaataaaaagtagacttattgatgtatgcgtgctcgcacaattctttaatggtgatcttctccaggggcttcctggagcgaagttcgataaaggcattgcgtatccctttttccgttttctcaatccgaagatccatggcatttcccccttgtaatccgacggttttatgaatccgtcggttatacgcctcttctcctatattgttggtggatgggcgcttttccatcttgtataatcattataaatcagataatcaactactgtctattattttaggaaaataaattggagggtcatttatggactattatggattttacactggaaaactattcgacgcctaccgctatcttggcgcccatgtagaagaggaaggcgtcaccttttgcacctttgcccccagcgcccagcgcatctcgctgatcggagaattcagcggctgggaagaatgccccatgcacaaagtctatgacggcaacttctgggaatgttacatcccggatgccagacccggcatgatgtacaagtaccgcatctaccagcagtccggatcctttatcgatcactgcgatccttacggatatggcatggaactgcgtccgaagaacgcatccatcatccgggatctctcttcctaccgcttcaaggattctaagtggatggagcagcgtacggatcacaggaaccagcctttgaatatctacgaactgcatttcggctcctggaagaagccttcaaaggaagaagaggactggtattcctatgccgaactggcagataaactgttgccttacctcaaggaaaacggctataactatctggaaatcatgccgttaagcgagcacccttgcgatgaatcctggggataccagaataccggattctacagtcctacctcccggtacggaaccgcccaggaactgatggagttcatcgatgcctgccatcagaacgacatcggcatcattatggactttgtccccgtacattttgccgtagatggctatgcgcttgccaactacgacggcactgcgttatatgaataccccaatatggacgtgggacgaagcgagtggggcagctgcaacttcatgcattcccgcggcgaagttcgaagcttcctacagtctgccgccaattactggctcaccgattaccatgtggatggcatccgcatggatgccatcagcaacatcatctactggcagggagatccggccagaggcgtgaacaagtcagccgtagactttatccgggagatgaaccggggcttgaagcagatgcatccttctgccatcctctcggcggaagactccacctcctacccctgcgtgacaaaaagcacggccgaaggcggcttaggattcgattataaatgggatatgggctggatgaatgacaccttggaatacttccgtaccgcccccgagtaccgtaccagggattatcacaagctgaccttctccatgcactattattacagcgactccttcctgctgcccttatcccacgatgaggtcgtccacgggaaagcaaccatcctccagaaaatgtacggggagtatgaagagaagtttccacaggcccgtgccctgtatatgtatatgtacgcccatccaggcaagaagctgaactttatgggaaatgagttcggacagctgcgggaatgggatgagaagcgggagcaggattgggacatcctgaaataccccatacatgacgccttccatcgctttatgaaggatttgaacaaactctatctgaagcatccggccctttttcgctgcgactatgctcctgaagggttctcctggctggactgccatcaggaagaacgctgcatctacgcttttgagcgaaccgacggaaaggagcgtatcgccgccgtctttaacttgtctgatcagattcaggaaggctaccggcttcctgtaaaagccgccgtccatgcttccatcctcctggccagcgatatggaggaatatgccggcgggcgaaagtatgaggctctggaattagcggccgatgcagggaccatccaactcgatcttagcccctacagtgctctctatcttcttctccaatagcaggaaaacgggcggtggatgacaaggcaatatgcttgtcgtccaccgcccatatttttaaatctaaaacttattaaccgctgccgcaagatactcattgctgacttccgagaaccgctcattctccacggcctctgcgagcaccgcatcaatcggcatctttcccagtaccggaatgtccagttcctctgccacctcatccacatggctctctccaaatacggaaatcttctttccgcagtccgggcataccagataactataattctccacgatccccagtaccggaatgtccatcttcttcgccatattgtaagccttcttgacaatcatctgtaccagatcctggggagatgtgacgatcacgactccatctaccggaagggactggaatacggtcaatggaacatcgcctgttccgggaggcatatccacgaacagatagtccaggtctccccacatgacatccgtccagaactgggttacgactcctgcgatcacaggccctctccagataaccggatccgactcgttctccagcagaagattgacggacatgatccttgtcccgtccttagcctcgcatgggaacatccctgcttcgtttcccttggccccctcatggatgccgtacatcttaggtatggatggcccggtaatatctgcatccaggatgcctaccgagaatccctgctctctcatcagtcttgccaaagaggccgtcaccatagactttcctacgcctcccttgccgctgacaaccgcgatcaccttccctacgtgtgaaaatgggttcgctggctccttcatatcctgtggcttgctgctgcaggaatctgcatgcgcgcagccggcgcagtcagatggagagcagccattttgttgttcttctgacatgatctatatacctctttccaaattaaattactctattcttctactgccgcaataacctcgatctcgcacagcaggttctttggcagcgtctttactgctacgcagcttctggctggcttggatgtaaagtattttgcgtaaacttcattaaatgccgcaaagtctcccatatccgcaaggaagcatgtggtctttaacaccttgtcaaaggaagttcctgcctctttgaggatctcgccgatattcttgcatgcctgttctgcctgtccctcaatcgtgtccgcctctaccgtatccgtcgccggattgattccaatctgccctgcggaatagaggattcctccatgtacatatccctgtgaatatggtcctaatgcctttggcgctttctctgttgatactaccttcataattacctctcctttgcctgttctaatattttttgtgcgatacatacgtcaaaaagccccattcccactgatttgaaataggtggtctttccgtcgcctgcttcttcatccgctcctgatgccagatactcatgcatcagcatgacccgatccatggaaaggcgcccctccgagatcggctggcttaagtccccgcattcttcgcatgcataagggagctctatatataccttatccacaaggtcccagatcacatccggtatttcccgcatatcaggagtataggaaccgatcgcgataatgcatttcccttccaataacgctctgtcattgggaagcaccggtgtcgtagaaggcgttgtcgtgcagatgatatcgcttttttccgctaattcttctactgtcttacattgtactacctttgtaccttccttatcaatagctttttccaatctgtccagataatctgtcaggtcccggctgctgtgattatagacgtacacagtatggatatccctggccgcgcatgcataaagcgcctggtgaaatccctgcactcccgcgcctataatgcccaccgtatggctgtcctttgccgccagatgccggattcccacgcctcccacggcaccggtcctccatgcggtaaccgtctgtccatccagtagggccagcggcttgccggtctgatagtcgtttaaaagcatcacgccgtcaatggacggcaggcccagtttggcattgtcggggaagatgctcaatatcttggtcccgatcatttcctttgtatagcagggcatgtacatcatagtcttattggcatcctccacggcctgcctgggcggcatgtaatagtccccctctccgaatatccggtaggcctcctcaatctggtccatcatctgattcaagtctatcagcgattcgatttcctgcttctctaatacgatcatgctatgctccctccaattcttctttttccctggttacattttttagccatttataactgagataccgctttatggtaattggcacctttatcagttcgtcactcatcaatatgacatagaccacaggcacgcttgcatgaaacacgaatgcggccaccgcgcccaccagtatggagaatccccacatggtagacacgtccatgataagcccgaacctggtatccccgccagagcggaagattcctaccaccatcgtgcaatttaaggactgggcgatcgtgaaataggacatgacgaagaacataaatgtcagatatccctttgcatccggactgagcgccagcgtagcgttggcaataggcgcggctgccaggatcaccaacgcgcctgctgctcccaaaatcaggctaagatagatgaaccgcttggcatacgccttggcatgctccagtttctgctctccgatggtcttgccaaggcagatggctgtagcatgggagatgccgaacaccacgacagtcgccagctgcctggctacctgagccactgaattggctgctacggccgagcttccaaggtggccgatgaccgccgtgttggcggagcttcccagtccccacatcagttcattgaggaccaccggcatcgcgtacaccatatagtcctttaaaagcaccttgtccacatgtaccatgtctccgatcctgattcgcaccacccggttctgaaaatatgcatagcacagcacgatgaccatctccacgattctggcacacagcgttccgatggcggcgccgcggattcccagagccgggaatcccagaagcccgaagatcagcagtgcattcacggcaatgtttacgatcagcgagacgctgtagacaaaggtggcaatcaataccctctcgatacttctcatgatatttaagtatacctgcgtcactgccatgaacagataggagaagccgacaatcctcaagtaccggatgccctctgcgatgaccgccggatctgaactatagatgcgcatcagcgcctccggaataaagagggcagccgccgcaaacgccacagccgtaaacagccctgccgcaagccccatccccagcaccttctcgatggtccttgtatccttctttccccagtactgggccgtcagaaccgtagccccggaagtaatgcccatgaagatcagcgtcatgataaactgaatctgtccggccaaagatgcgccggagagcaccttctcccccactcctcccagcatgatcacgtctgctgccgtcacccccacattaatcagattctgaatggccatagggatgaccaaggcaaatacattcctgtaaaaacttccccaatttatattcaggcgttttgctgcctcctgtcctggtctcttcattcgtaagtcctccaaattttccagtctgataatcattgtaccaaaacaatggcaggatggctagagcatcccaatctttttcatacctgacaccagcccttcaaagcgccggatccggaaccgctcgaggttccttcgccccactttctgtagataaataatgacctcctaccagcaccatcacagacctctccccggcaaggaccttatcctgcgccacaggcaccggttcttcgtggtatcccacgccttcctcgccggtattcgccgcaatgctccacttcatatctcccggcagggtgggaagcgtgaccgtcatggcctcccagtaggcattgatcagaatatagacgatgtcgtctttctttcttttgctgtcaaatcccgcaaacattgctgctatgaccttggcatcctccccaaagtctccttcaaaaggccgcaccccatgaagactcacatccataaggccgcatgtcgccgggctgcacagtccatggatggcaggatgcttcttgcggaaatggatcatataccggaagaactggtagatatcctggttcttcttaagcagtccccagtcaagccacgagatctcattatcctggcaatacggattgttgttgccgaactgggtattgcaaaattcgtctcccgcaaggaacatgggcgtccctctgcttgcaaggagcgttgcgcaggcattcttgatcatccgctttctcagatggaggacctccggatcgctggtctcgccttccaccccgcagttccagctgcggttatcgttgccgccgtccgtattgccccagccgtttgcctcgttgtgcttctcgttatacgagtacaggtcgtacagcgtgaacccgtcatggcaggtgataaaattgatggaggcatcctttccccggatatccggatcgtagatatccggcgatccgatcaggcgcttggccgcatacttgccgcaccataagcctcccttcagatattccctcatatcatcccggtacttgccgttccactcgcaccaccgcttaaatgcagggaagtctcccacctggtataatcccccggcgtcccacgcttcggcaatcaacttcgtatcagcaagaatcgcatcctgggccagcgcctgaagaagcggaggcttcctcatcggcgtgccgtcttcgttgcgtccaaggatggacgcaaggtcgaaccggaatccgtcaatccggtaagtcgtgacccagtacctgagacagttgatgatcatcctctggaccaccggatgattgcagttcatggtattgccgcagccactgaaattataatagtatccatcgggagtcagcagataataaatattgttgtcaaagcctttaaaagatatgaaaggcccattctcgtttccttctgccgtatgattgaatacaacgtccagaataacctcgattccgttctcatgcagggattttaccagctgcttcagttccgtcccctcccggttatactctacggcagatgtataactggtgttgggcgcaaaaaaactgacggaattatagccccagtaattcagaagttctcttccatccaccaccctccggtcgctcagctcatcaaattcgaagatgggcatcagctcaatggcattgactcccagatcctttagataagggatcttctgtcggattccctcaaaggttccaggcgcgctgactccaggatccatcatggtgaatccccggacatgcatctcgtagatgaccaattcctccattggaatcttgggccatacttccgtgccccagtagaaattgttcctcaccacccgggcccggtatccgtcatcgctgaccttccgtccccaggtactctgcccggtcactgctttggcgtaaggatccagaagaatattcctcttatcaaagagaaggccctccttgggattataaggcccatccagcctgtaagcatattcgaattcctccacattcaggccgaataccaccatggaatagacatttccaatcttataattgtccggaaatggaatcaccgcataaggctcggactccttcctgtgatagaggagcagttcgcaggaaactgccccctgggactgcaccgtaaagcagactcccctggggatcggggtcgctccatcgaacatatagaagcccggccttacatcgaatccgttgacccggtccaggggttccatatgctgtatctccatgtccaggggcgtggtagccgtcaatagttccatcgtcttatcctgttcgctgttcataggcattcctttcttactacctcgtagtattcagataatagaccgccaattgcgtgcggtctcttagttctaatttgtccagtatgctgctgatataattgcgcaccgtaccctcgcttaagaacaggcgcttcgcaatctctttattgctcagaccctccgccaccagggagattacttccagttccttcccgctgatctcatgcgcctcccagtcaaaggtcttcttctcctgcagaaggcccggtatcttggcgataatctcagtcccaaataccgtctggcctgtttttaccgcctgcagtgccggtaggatgctgttgtaatcctgcttcagcagatagcccttcacgccatatttcagcgcctttacaatgtattcatcgtcggaaaaggtagtaagaagcaagatctttgcttcgggatactcctttagtatctcccgggaggcagccagcccgcttacattcttcatgcggatatccatcagaagcacatccggcttgtgctcccggtacaatcttagcgcctcgcctccatcctgtcccatgccagatacccggatctcttccttggactccagtatcgtcttcaatgcgctggataccagcacgtcatcatctataattacaatattcaaatccctacctcctctttcttcggcaccgtgatgtagattcggaatccccgctcctttcggatctgtatggttccgtccagcgcctcgatccgctccttcatattctgtatcccgattccccgggcaccatcctttacttcttccgaaccgctgacgcttccgttatcctcgattaccagctggtacagccccgggtgctctcttgcaagaacgctcacccgggtagcgttgctgtgctttatgacgttgttaagcgcctcttttacaatcatgataaaactatacctgatctcccttgggacatcgtatcccatatcatattccagatgggccttacagaaggtgaaatcgcccaccagctcccccagaacttccttcatattgatggactcgtcgtgaaggtcgtggacgctttgacgcacgctgctcatcgcggcattcaaggtaacctccagctggagcagcggttcttttaagttctcttccctgctgatggccttcatggctcccaccataagaatcgacctggacagcatatggcccacattatcatgaatctccctcgcgatccggttgcgctccctcaaggtggctgtatagatctcatagtcctgcttctccagcagattctggttcttctccttcagtagaagattcagttctgcgccgtcatccctggtctttcgatacttatgctccagttcttcaaactttccggtctgatactggatcagcatagccaccgcgcatccaagcgctataaagcacataatgtctggctcctttggtccataagaattcagataaagccccgccaggacagcaatcagtatatactgtcggtaatccagcaggccatataatacgagcggggtgaagagcaagaactgcgggattacgattgatattgcaagaaaaacgatggcggatgcaagattccacttccgggaatcccgatagagattggatgccccatagataatggccgcaagaaaggcgacgagaaatgccgtatcagccggcaccagcaatacggtggcaaaacaatatatcagcaagactgtctggtcgatcgttctcttcataaatatacgtttcctcataaatgcccggatgggcatgacatttgtcacttgccatcctgacaactgacacttacattataaacgccagggctttatactacaagtaacaaatcacaaaacagaaagatccataaggaggaacacccatgatccacattgaaaatctggtaaaacgatatggagacctggtggcgctggaccacttaagccttaatatacaggagggagaaatcttcggcctgctgggtcccaatgggtccggcaagactaccgccatcaactgtctgctcgcgctgttaaaatatgacaagggcaccatcaccatattcggaaagcccatgcgtcccaacagttatgacatcaaaaaagacatcggggtagtcatgcagaacgtggcagtctttgaacagatgaccgtccgggagaacatcgactacttctgcggcctgtacgtcaaagacaaggaaaaacgaagaagcctggtggaggaagccatcgcgtttaccggcctggaagacttcgagaaaatgaggccgaagaaactatccggcgggctccttcgcaggctgaatattgcctgcggcatcgtgcacaagcctaagcttatcatcctggatgagcctaccgtagccgtagatccccagagcaggaacaagatcctggaaggcattatggaactgaaccgccagggttctaccatcatctacacttcccactacatggaagaagtagagcagatctgctcccgcatcgccatcattgaccacggaaaggtcctcgccacaggaacgacggaggaattaaagaggatgatcaagaccggggagaccatcaccatcgaggccatctcgctgactgacttggaactggccgagattcgccagctgcctcatgtattcgatctctcttacgaggagcagatactgaagatacgcttaagcagcgccaagcataacctggtgcgcgtactggattatctgaaggaaaacgacgtctccttcggccgggtattctccgaactccccaccttgaatgacgtattccttgaaatcaccggcaaagagttaagagattaggaggcacgctatgctacacttactgaaataccgattcatacagactgtaagagactatcccatcatgttctgggcgctggcctttcctctgatccttggaaccttcttctacttctctttcggcagcgccggccttgatggaaccggagactacgagtgggatcctatcaaggtggccataatcgaggaagacttaagttccaagaatgccgaatctttccaagccttccttgagaaactggagcccgacacgctggacatccaggatatttcttccgaatctgacgcaatcaaagccttgaaagaagagaccatccttggaatctattacgtagacgatatcccttctctctccgtagggaaaaacgggatcaatgaaagcatcctgtcttcccttctgaaaaattataaccagaacgcggccatgatccagaagatcgcaatgactcatcctgaaaagatgggcgcggctattgaggcaatgaaggattatcatccggagaccaggaacgaatccctgggcggaaaaacgctggaccctaatgtgcagtatttcttcgcattgattgcctacgcgtgcctctccggagcgtttctgggcgtccgctccagccttgacagccaggccaacctgtctgcgcttggcgccaggcgcagcataacccctacccataagctgaagctgatcctgatagacatgacggtgctgttcatcatccatttcattaacatcctggttctcaacctgtatcttataaaagtgctgggaatcagccttggagataatatcggcgcgctgctggtcgtggacttcatgggaagcatgatcggcgtaagtttaggaatcgccttcgggtgcctcggcaaactgtctacggatatgaagctgggacttacggtcgccatcaccttgattccgggattcctggctgggctgatgttcggcaatatgaagaatatcatcgaacttcactgcccaatcatcaaccggctgaatccggccgccgtattaagcgatgccttttactgcatgagcgtatataatgacgcgcatcgctttgcaagaagcatcggcattcttgccatcatgagcgcgctgtttctgctcattgcatacctgggcataaggagggaacgatatgacagtatttaaaggttttatgactatcaccaaacgcaatcttaatattttattcctgtatatcgccatctttctggccatatgctttgccatccagaagatggatgtccagaacaccgccaagtcctacagcatggaaagcctagatatcgcggtcatcgaccgggacggcggggaactggctaagggaatggcctcctacctggaacagtaccataccattaaagacatgcccgatgacaagtcggtcatccaggaccgcctcttctaccgggaagtcaattatgtagtgacgatcccgaaggattttgaaagcagatgcctgaatggaacagagacgcttcccgtcatcaaggttcccgggagcactaccggctactatgtagaccagcagatcgacaccttcctgaataacgtgcgggtcctgactgccagcggattctctcttcccgaagccattgccgaagtgaaggagaatgcaaaggagccggcggacataacgctgatcgataagaatgggcatgggggccgacggacgatgtactccttcatgtaccagtatatgccttatatcctcctgtccatcctgtgctattccttgacctatatcatgatcgcctttaataagccggatgtcaaaaggcggatgctgtgttccgccgtatccggcaaacggcagaacgcccagctgatattaggctatgcggtcatcggccttgcagtctgggtgttgtgcaacatgcttccggttctcatgtatggaaaggaatttttaaaggatccgcacctgccccactatctgttcaacagtttcctgctgatgctggtatccctttcgatctcattcctggtgggaagcctggtacgcaaggaggagatgatcagcgcagtggtcaacgtagtctcccttggcctgtcctttatcagcggggtgctggtaagcctggaggtgttaagcaaaggaatcaagaccgttgcacgcttccttccgatctattggtatgagaccggcaacaacttgatcgccaacaaccacacgttcagcagcacccagctgaaatccctgtatacagggtacgtcatccagattctgttcgccctggcattcttattcatagccctggtgatcatccacaaccggcggcaaagcgcgaattagcaagagaaagaaggagcctttgatgaacttaatcatcaaaggcttcctttactttatccataaatccttttttcttcttgccgctcttgggctcggaatcgctttcagacgcggttcccagcgtattgccggtcagctcgtcaaatcttcgaagcgcttctttcgcctcctggcttagatgttccggggtctggattaccaatgtcacatagtgatcgccccgtacctgggaattgcgaagggatggaacccctttccctttcagccgcactttcgtatccgtcttcgtgcctggcttcacattatacagaacttccccgtctaccgtcttgatccggatatccgcgccgatcgccgcctgggcaaatgagattggcacagtggagaagatatgcatatcctggcgctggaatatcggatgcctggatacgttaacctctaccagcagatcccctcttgggccgccgtttacgcccggctctcctttttcgcggatacgcacgctctgtccattgtcaatgccggccggtatcgtaaccgcaatcttcttcttattggatacatatcccgttccactgcaatccggacatttttcccgaatgatcttgccggttccgtgacagtccggacaggtctgaacattctgcacagttccaaagaaggactgctgcgtatatactacctggcctttgcctccgcattttggacaggtctccggggaggttcccggcttcgcgcctgtgccgctgcacttcgggcatggatcttttaagatgacctcgatctctttctcacagccgaatactgcctcttcaaaggtaatccttacgctcttgcggatattcatgcccttcatagggccctggcctgcacggcccctgcggctgccgccgccgaacaggtcgccgaatatgtcgccaaatatatcgctgaagtccgccccgccaaaatcaaatccgccgaatccgccggcgcctccagcgcctccttcaaaggcagcatggccgaactggtcgtactggcgccgtttctccgggtcactcaagactgcataggcttcggacgcttctttgaacttcttctctgcttcagcgtctccgggattcatatcaggatggtatttcttggcaacctgtctgtatgctttttttaatgtggcgtcgtcggcatctctgctgacgccaagcacttcatagtaatctctctttgattctgccatcttttatccctttctttcatgtacataaggaagttccgcgagactaagcttaagaatatataatctcgcttgagtttcgcggaacagtattcgcactgggcttatacttccttatagtcaccgtctacaacatcgtctccctggaagccgtccggtgcagggcctgctcccggattcgggcctgctcccatgttcgggtctgctccctgtgctccggctgctgctccggcctgttcatacatcttagtaaataatttctgcgcgctctccatcagtttctctttgcctgccttgatctcggcaatctgcgcgtctgatatatcatccatgtttactttttcaaggatttccttcaatgccttgcagtccgcctcaacggtagccttatctgcagcatcaatcttatctcctacatcgcccagggctttttccgtctgaaataccagggcgtccgcatcattctttgtatcaatgccttccttgcgtttcttatcctgcgcctcgaatgccgctgcttcttttaccgccttgtcgatctcgtcatcagacatgttagagcctgccgtgatggtgatatgctgctctttgcctgttccaaggtcttttgcggatacatttacaatgccgttcgcatcaatgtcgaatgtaacttcgatctgcggtactccgcgtggagccggcgggattccgtccagcctgaactgtcccagagacttgttatctttggcgaactgtctctctccctgtacgacattgatatctacggctgtctggttatctgccgctgtggagaagatctggctcttcttggtaggaatcgtcgtatttctttcaatcagtcttgttgcaacgccgcccatcgtctcgattgacagtgacagcggagttacatccaaaagaaggatatcgcctgcacccgtatctccggcaagcttgccgccctgaacggatgcaccaagcgctacgcactcatccgggttcagagatttgcttggctctttgcctgtcagacgcttcacttcttcctggacagcagggatacgtgtggaaccgccaaccagaagtacctggcccagttcggaagcggtaatgcctgcgtcagaaagtgctctcgttaccggctcggatgtctttgccacaaggtcatgcgtcagttcatcaaattttgcccttgtcaggttcatatcaaaatgcttcgggccttctgctgttgctgtaataaatggaaggttgatatttgtggtcgttgcagaagacagttccttctttgccttctctgccgcttctttcagtctctgaagcgccatcttatcggcagacaggtctacgccttcctgcttcttgaattcagcaatcatataatccgtgatcttctggtcgaagtcgtcgccgcccagcctgttgttacctgcggtagataatacctcgatgacgccgtcgccgatctcgatgacggatacgtcgaatgtacctccgccaaggtcatataccatgatcttctgttctttctcattgtcaagtccgtaagcaagcgctgccgcagtaggctcattgatgatacgctttacatcaaggcccgcaatcttgcctgcatcctttgtagcctggcgctgagcgtcattaaagtacgctggcacagtaataaccgcctctgttaccttttctcccagatatccttccgcgtctgccttaagcttctgaagaatcattgcggaaatctcctgtggagaatatttcttatcatcgatcgtcactctgaaatcagagcccatctctcttttaatagaagagatcgtcctctccgcgtttgtaactgcctgacgttttgcaggctcgcccacaagacgttcccctgtttttgtaaatgctacgacagatggcgtcgttctggcgccttccgtatttgcgatgaccgttggctggccaccttccataacagccacgcagctgttcgtggttcctaaatcaataccaatgattttgcccattataaagacctcctgttttattttctaaattatctggaattagtttgctacttttaccatgctgtgcctcactacggagtcacggtacatataacctttctggaattcctcggctatgatattctcgccaaagttctcatcttccacatgcatcactgcattgtggagattcgggtcaaattctttgcctaccgcttcgatcggcttaacgcccaattctcccagcacggtcattaactgcttatacaccatctccattccctggataaatgggtcttccttgtcttcttccttgacagcgtcaagccctcgctcaaagttgtcgactaccggaagcatcttttctatgatatctttcgctcctatctcgtacatctgggatttctccttttccgtacgcttgcggaagttatcaaactctgccatttgacgagtgagcctgtcagtcagttcctcaatcttctcgtcctttttatctttcttattcttcttgccaaataacttcttgccggattttttatcttcgtcttcctcatccggctcttgttcctcatccggctcttcttcctcgttatcggagacctcttcgtcttcggaagcctctttggcgttctcttcttctgcctgatcttccccgggctcgccttccggctgttccccggccgactttttggcttcttccacagcctcttttaccatttcttcctggctcttttcctgattattctccaagggttcttccacctttcctattcttttctatgaaacatttcatccaattcgctttgcagccgcttcatggattttaatacatgctcataatccattctctttggcccgataatacctatggttcccttcatgccgtcgcctaattcataagtggcggtgacaacgctgcaatccttcatggtcttgaccggcgtctcatcaccgatgtaaacctggatgccagtattatcttcctgcgataacgtctgcgttaccaactcgctaagctgctgcttttcctcaaaggcgctgataatctcctgggcgctttgattatcgctgagttccggatacttgaagatgttcgtggctccgcttgtatagatctgcatatcatcatccacctggatgacatccgccaccgcatccagaacgtttccaaccacctcgctgtgtatgcctgcctgctccttcagccttgcgatcaatccaagattgatttcctcgatagacatgccattcagcgtcgtgttcaaaagcatattcaatttcaacagattctcattgctgattggctcgtcaatgtcaataatcttattcttgattacattgcctccaagcacgattaccgcgatgatctgctcatcgtctaccatggacagttgaatgaacttaagtttgttctcattgttcatgggcgtagataccatcgttgcataattcgtactgttagccaggacctttgctgcctgtcttagaagttgatccatcttatctgccttatccagcatctgttcctgcatctcgctcagttcctgttctttttcttccatcagcatatctacatagagtctgtagcctttatccgaaggaatgcgtccggccgacgtgtgaggctgcatgatatagcccatctcttccaagtccgccatctcgttacggatggttgcagaacttaagttcagatccgtatacttcgatatggttctggaaccaaccggctcgcctgtctccagatagttctggataatcgcatgaaggatcttaagcttgcggtcgctaagtccatgttctgataccatctatcctcctcctttcggattttgctgttagcactctacattttcgagtgctaacatcttcgattattaatttagcactccctttttcttttgtcaacactatttatacaatttttataactaactcctggctgagttcgtttccatagatgacctggggaattcccacctcattttgcgcggcattcagaatctcccgaaagcgcgccccatccttcccgcccgcgggcagatggattgcagatacccggcgcgctcccagcgaatgtccgtacagatgcaagtgtctcccaaacggatcagaacccctgcattgtctacctgccggattaagatatctctgcaatccaatcgattacctccttcacctgcttctgcctttctatggcggattctccttctgccgcgtccgtggcggcgtctgacagatcataacgcctgcctctgaatgccttctcgatcgcctgcggcaggcctatgtccaatgcgtccgtatatacctttatctccttgatgacgaggttttccaaatgcatctgaatctctacttctccccagccgaaccgtttctggtggatgatctcgcacgccggagactgtccatatacccattcccaggaacaataggattcatagatctgccggatcttctcttgatcctccctgcttaatttcagaatctgcgccgtaccatattccttctggaaactttccgccatctgctccataattccctgtgtcgtgatttcctggttcaagtcccttaggttgcacaccctggatctgacggaatcgacgcctttcgccttcattttctctttagatggcgtcagatagcgggtcatcctctccttgtccacgtccaccatcagcgttccgtgctgcacattgcagctggccgtcttagaatacgcattgccggaaaatttaagtccttccttggtcaggatatcattccggccggaagcctgcgtctcaattccgtagaatccgcacgcatccgcgatgatcccggactgtcttttcaagtcatacatctctggagacgcaagaaatgtgaagcagacatttcccatatcctggtagaccgcaccacccccagtcgtccgacgggccacatagccgccttcctcttccagaagcctggctctgcattctttcaggatattctgattctttcctattactacagtatgctcattctgccacaggtacaaaatgacattcccttcttttaccaatgtctgcaagtgggcttccactgccagattgtatcttggatcattcgattctgcccatatgatgtaattcatattttccctcctcattattatatataaatgctgtccttattgctcttcaccagccctttctccaattgtataacagcattatagtacaggtaaaaacagcacaatgtccatgcattgtgctgtttgactgataaaactgcaatattatgtgattttcatttaggccttcgcatcattgtgcaacggcgctagcttaattcgactttctgcgcttcttccggcttaaaatcattctccaagtcatagatgttgtgccctgtagattcactgagcactctgccttccagagaatagcagcggatgaatctctttccgtccacgcttgaccagtgctccacgtcccagctcatgtatccgtcctcgtcgcttttcttttctttcagatacagatccacttggcgtccgtccttcatctgctgaatcagtcccttggttccgtccacttccacttctaccttatttactttgtcataaatcttcatagcattccctccgctaatctcatattaacttacggtatgattatacctttaataagaggaaaaaacaatacttgtgaatccgctcttgacaaatcgctttttctatcgtattattgtactaagtttataatacagtaatacattagtacagaaggaggcaatctcatgactgcaatattaagaaccaatcatctgaccaaacgatataataaccgggcggtcgtaaatgacctgtccatgacgatccatgaaggagatatctatggtttcatcggcaagaacggcgcgggcaagaccaccctcatccgtatgattaccggacttgcatctcccagcgacggaaatatcctgctgttcggaagtcccgaacttaaggaaggccgctcagccatcggaaccgtcatcgaatctcccgccttttatccgggtatgaccgcaaggcagaaccttattgtccagtgcaagctgcaaggcatccgtgacgaatcccaggcagatgccattctgactctggtggggcttgatgataccggacataagaaagccaaagacttctctctgggaatgcgccaaaggcttgcaatcgccattgccctgattggaagtcccagacttctgatactggatgagccaaccaacggtctggatccggaaggaatcaaagaggtgcgcgaattaatcctgaaactgaaccgggatcgtaaaatcaccgtattgatttcctcccacatcctgggagaactgtcaaaattcgcgactcgctatggcatcatccatcacggaaagttaattgaagaatttacggaaaatcagctgtgggaacgctgcagttccaaagacggtaccaggcagatggacctggaagattatttcttaagcagaataggaggaagatagcatgctgaacttactaaaaagcgatttctacaaactcgggaaggcaagatacttctgggtatgcctgatccttaccgcggccctggctgcagggaccgtcttcttaatggactttgcctataagatggccggggagcagatgacccagcaagtggaacaaaagcagcaggccatggatgaaaacggaatcaacgtgactaccgagggcgttccggcaagccgcgaggaactgtcagcctcccgtcagatggtaaccttttttgcaggcaataccacgctgatcctagcagttctcatctctcttttcgtaggcagcgaattcaatcacggtaccatcaagaacattgcctccaagaattatggccgctcccagatctacgcttccaaactggctgccggcgttctctgcggaatcctgttcacctttatctatgctgctgtctctatggctgcggcaactatcctgtggggattcggggatgtgaacgcaggcttctggccggatgcccttaagtctgtcggactggaactattgctgacaagtgcctttgtatctatcttcgtaatgttcagcatgctgatccgccagaatggaggctcgcttgccgctaatatttgttttctggagtttgtgtcgctgatcgtgatgctgggagagatgctgatcaaaaagatcagtggaaaagaaattatcctgagcaattatctgattgacacgaatatgaacgccatcacggcaggccttaataaagccatcgctgtacgaagcctgtgcgtggcttttggctttttcctggctgccatgctgattggaatgttaagtttccagaagcgcgacatcaaataaaattaaccgctggttcatttattgttccgtcagttaacttcccctccattgtctgaagtcggaggctctgctatgatattcttaacccgaagatgcacagataaataggaggaactatgatatgaaaattaatgaaatgatacgtaccagacgcaaggaaatgaatctgacccaggagcaggtggcttcccgccttggcgtgtccgctccggccgtccacaagcgggaaacggggaactcttatccggacatcaccctgcttcctgccctggcaagacttttgggcacggaccttaataccctgctctcctttcaggaggatctaagcaggcaggaggtggatcagttctgcgctgatctttgccagatgattgaggcgaaagggttcgcggccggctttgaggctgctatggataggactgcccagtatcccaactgcgatgccctggcttaccttgctgctgccacgctggaaggctgcctatatctattgtctgctgaagatgccggaccataccagaaacgcatagaagcactttacgaacgggcttctcacggtgatgatgcaacgatacggggcctggccagatccatgatcatcagcaaatccatggcccgtggagagtatgaaagggcgcaggaactgctggatgaggacaaagaaatttcaaaatcgctcttccatcatgtatttctgcaaagcaatctctaccttcagcaggacaggctcgaagaagcttccgaactgctggagcgggaattgctcggcagcgccggcaacatccagtcaacgcttctcatgatgctggacattgcgctaaaggaacaggatatgcacgcagcttcttatatagcccaagtctctgaacagaccgctcatctatatgacctctggtcctataactcctatgtggcaggcttccagctggccgtatcggcaagagatgaatcggaaacgctaagatatctccaaaaacttttagaagcgtctcaaaccagctgggatataagtgcctccccgctataccgccacctgccggaaaatggaggggcattcctgaaggaccacttccccgcaggcctggcaaactccatgaaaacagatgaatgcctaacgtttctccacgacaatccaaaattctgggaactggtcaaaaagtatgctaatgattagtcctggccgtacagccagaattcgaacttcttataatccaggaggccctcgcctcttaacttgctaagttccgcagacatggcgcttctttctacacagagataatctgccagttcctgcctgttaaatggaataaagaagtgccggcttccagcctttttggactgtgacgacagataagacagcaatttttcccgcgtactcctttttgagatatggccaatcttctcactgagcatcacattctttcttgccagaatatataccatgttctcaaccatcttctgatgaaaggggcaggccgtcgggcagacggaaaggatgcggccagcctcgagaaagagcaccttgctctcagatatggaagtgatgctgaccgggctgttctttatgcccgcacaggcatacgctgcgccgaatagttcgcccggctccagcatctcctgaatattccggtttccgaatacatcttcattctccacctgcacgcacccctttaggattacccctaccttcttaagcgtctctgcttctgtaaggatccgctcattttttccatatgtcttcatctgtccgtccaggcaggatatcatctcttccatgtcctgctcgtttacccctgtaaatagcggagacatctgtaaaatttttatgtcatttttcatattttacctcttttgttggaaatacaacatatcttctgattttattatagtagactaagcctatcaaatcaaggaggtaagacgatgatcagaaaaatcattcgaatagatgaagagaaatgtaatggatgcggcgcctgcgcagatgcctgccacgagggcgcgatccagatgataggcgggaaagcccgtctgacccgcgaggactactgcgacggccttggagattgcctgccggcctgtcccgcgaacgccatcacctttgaagagagggaagccccggcctacgatcaggcagccgtaaaagaacatctggcgaagacccagaaccaatggcccgtacagctcaaactagttcccacccgggctccttattttgacgactcggatctgctgattgcagccgactgcaccgcctatgcttatgctgacttccataggcagtttagtaaaaaccggattaccttgatcggctgccccaagctggatgccgtcgattatacggaaaaacttgccgaaatcctgaaatccaatgacattcgaagccttaccgtcgtgcgcatggaagtcccctgctgcggcggcatcgaatacgccgcaaaagaggcgcttaaggcaagcggcagatccatcccctgccaagtagtcaccatcgggatcaatggcacgatcctctagttaagctatcctttcagatattttatttcatgaatttgtctatggcctggttcagccgctcaatggcttccaggtcattttcttccaccgcttccacgatgcagtggttcatgtggttctttaagaccaccttgcccgtattattgatggccgagcgcactgctgccagctgaatcagcacgtcgctgcagtcggcatccttctctaccatccgttttacggattccaggtggccgatggcttttgacaggcgattgatgaccgccttcttttcctgctggctatgcacatggccatggtgcttaagctgataatcttccagtccatcctcatggctgtggggcgtcatctgctctttctctgtatgttccatagtgtttcatccaccttcttatgcttctatccttttttcaaatactccatccaccttttgatctctttttcctgccccatgtcccctggctcatagaacctggcatccttgatctcttcgggaagatactgctgcttcacatagtggtggggataatcatgggcatacttatagccgatgccgtggcccagattcttagaccctttataatgagcatcctgaagatgggccggtacgctggtcttctggctctttacgttttccatagccccgaagatcgcattggtggccgaattgctcttaggcgcggttgccacgtataagactgcctgggacagaatgatctgcgcttccggcattccaatccgctctactgcctgtgccgcggacaccgccacagttagcgccatggggtctgcatttcccacatcctcggaagcgcagatcataatcctccttgcgatgaacttgatatcttctcccgcatacagcatcttcgcaagatagtatacggcagcatccgggtcagacccccgcatgctcttgataaatgcagagatggtatcatagtggttgtctcctgtcttatcgtagcggactacccttttctggatgcactccgatgccacagggagcgtgatatgaatctttccgtcgtcgctcctttctgtggtaagaatccccaattcaacggcattcaacgcatttcttgcgtctccgcccgagatgtcagccagaaattccagcgcgtcttcctcgatcaccgcatcgtaactgcccatgcccttttcgacgtcatagaccgcgcggcggatcaccgtcttgatatcttccttgtccagaggatgcaattcaaagatgctggagcgggagatcaatgcgccgtttacctcaaaatatggattctcagtggttgcgcctattaaaataatggtcccgtcttccacgaatgggagcagataatcctgctggcttttattaaaccggtgaatctcatccacgaaaaggatggttttcttctggtacatgcccaaggtttctttggcccggcccaccacttcctccatgtcctttttcccggcaaccgtggcattgatctgggtaaacacggcgctggtagtattggcgatcaccttggcaagcgtcgtcttcccggttcccggcggtccgtaaaatatgatagaacttaacttgtccgccttgatcgcacggtaaagcagcttgtcttttcctattatatgctgctgccccaccacctcttccagcgtggacggtcgcagcctggaagccagtggcgcttccttgtccatattcttttctctaacgtagtcaaataaatccatcttccgttccctctttcacaatctaacgcctgttattccaattctgcaagcagatcccgtatggcttcgcctgcaatcagaagccccgctaccggcggaacgaaggatatgctccccggaagggctctgctacgtcccgcgtcttcttctgtctcccggtctgatacatccacaggcatttccttggaatacaataccttcagatgccggattccccgtgctttcagttctttacgcatcaccttgcaaagcgggcacacggaggtcttgctgatgtcagtaatctcaaacaactcgccgtgcagcttattcccggttcccatgctgctgatgatcgggatcccgcattccaatgccttctgtgccagggcaatcttggccgtcaccgtatcgatggcatcgatgatatagtcaggccgctcttttaatatctcttctagattctccggaagaatgaatgtctcataggtagacacctgcgtttccgggcagatatctgcaatcctttctttcatcacttccgtcttataccggccaatcgtactgtggtaagcgatggactgccggttgatattggtcagcgagaccttgtcattgtctaccagtatcagcctgccaaccccgcttcttgccagcgcctctatgcagtgggagcccacgccccccacgccaagcaccatgatgcaggttctgcgaagctttcggagtccttcttctccaattaatcgttctgttcttgaaaattcatttatcatttctttctaccatctataccttttcatcttatctaatccaggatcaattcatccacggttacaaactcgaaccccttctccttaaggatatctacaatgcgaagggcagcatccacgctggaatcataacagtcatgcaatagaataatatcattttcctcggcttccgtcactactttattcacaatttcatccacattctccgtggtccagtccagcggatctatgctccacatgaccggcatcacttccaggtctaattccagcctgcgctgccatatcccaaaaggcggcctcatgtattccacatgctttcccgtaattgagaagattgcctcatccgtatccaggatctcttttttagcctcgtcgtccgataccttggcgatatccacatggttgtatgtatggtttccgatcagatgcccttcttcaaacagccgtttcacaagttcgggattttccttggcattctttccgatcagaaagaaagtggcttttacatttctttccttcagtccgtccaagagccttcccgtacaatggacgcttggcccgtcatcgaatgtaatggcgatcttcggagcctccgctaccatagtagaacttacatactccaccgcatccgtcacggctctctcctctgcggcttcctttgcaggcttgttttcattctgcccggtatgcatggatattcccagcaggttgaacaggcagaaggtatatagcagcccgcataatatctttattttatgcctcttgattctctccatccggcactacctctgatgatctgcgcttcatttcatgtatatgaggatatgcaaagcagtatgtaagccattgcaatatatattggagaatgttataatagccaatgttatttaggaggaaaaaatatgtcagatatacagacgaaagaatatcccgaaagggaaaataaaatgggaaccatgccggttccgaaactattgatcactatgtctctgcccatgatgatctccatgcttgtgcaggcactgtacaatattgtagacagcatgtttgttgcccagctcagcgaggacgccctgaccgcagtgtcgcttgcctttccgattcagacgctgatgatcgcggtagcatccggtactggcgtcggcatcaatgcgctgctttccaggaatctgggagaaaagaattttgaaggcgctgacagtgctgccaagaatggcctgttccttggaattgcaagctgtatcgtatttgccgtagttggacttctgggctcccacttcttctttgccttgcagacggataaccagaccatcgtcaaatatggcacggaatatcttaccatcatcacgctgtgttccgcagggatcttcctgcagattaccttcgagcgcctgatgcagtcaaccggaaaaaccatttacaacatgattacccagggaaccggagccatcatcaatatcatcctggatcccatcatgatctttggactgttcggcttccccaggatggaagtcgccggggcagccctggctaccataaccggacaggtggtggcagtgtccatgtccttttattttaatgctaccaggaataaagagatcaatatcagcctgaagggattccgtccccacgctaagaccattgccatcatctatgaagtaggcgttccgtctattattatgcaggctatcggatctgtcatgacatttggaatgaataagatcctgctcatgttttcttctacggctgctgctgtatttggcgtgtacttcaagctgcagagttttatattcatgccggtattcggactgaataacggcatgattccgatcatcgcctacaattacggcgccaggaataagaaacgtatcacgcaggccgccaagttaagcgtcctgatcgccgtaacgattatgatcataggtctgatcatcttccagacctgctctggattcctgcttaagaatctgttcgacgcttccgagaacatgctgtccatcggcgtgcccgcgcttcggatcatcagcctcagtttcctgtttgcgggctactgtatcatcgtaggctctgtcttccaggcgcttggcaacggcgtttacagcctgatcgtatctgttgccaggcagctcctggtaatccttccggttgcctatctgtttgccagatttttcggactttccatggtatggtggtccatcccgatcgcggagatcgtctccgttatcctgtccaccctactccttcggcgcatctaccggctaaaggtaaagccattggaaggctgatacagcaaaaaggatatgtccgccacaaagtggcaggacatatcctttttgctatctcttctttttcacgctccatccgaatttcccaaggggcttcccaaggcttaagtattctccatgggaataggtcaaaagtcctgtggaattcagttcgaatttcccgttctttttcatatatgcttcatctacctggacggctgccacttctgccagaaacatatgatgcgttcccagttccttcacttctgtcaccttacattcgatattcaccggactttcctgtatagtcggtgcatagcgcagtttctcggccgcaccttttgtcagatgcatctttgtccatttatctacatctttcccggatctgacgccgcaccagtctgtagcataggccagcgactctgtggtcaggttgaccacgaattcgccggtctccttgatcatgtgataggaataccgctccggcctgacgtatatatagagcatggctggatctgaacagactgttcctgtccatgccaccgtcaatatattggcatttccttccttatccgccgagcttaccatcaccgcgggcaacggatacagcatattgcccggcctccacacctgtcttcccattctttcattccttcctgtctttttcaatatttcctgtatgcctattgctgaagcgctcccaccagagtcggaatcaactgtttctttctggataccacgcctttcaggataatcttatccgcatcctctctcagatcataggcatctatgatatacgcctttgccccattgccgaagcacagcagttccgtagattcatccaggatatccgtcagcatgaaatagatcatctgcagcttatgagattccaataccttcggcatatgcggtatcagggtcttcttgatctcttctaactcatcccggttcatggagttaatctgccccacgccgaacacgatgtcattgaccgtaaactgcttgaagtcctggaagcagatgtcctccgcgctctttcccttcaggctgcttcctgcccggaacatctcctgagccatctgctccaggttgatgcctgcaatcttggccagcctctttgctgccctctcgtccacagcagtacaggtaggagaacggaacagcagggtatcggatataatcgcggagcacagaagcccggcgatggttggcgtgatcttaacgccggcctcctcgtacatctgatagacgatcgtcgccgtacagccaaccggctggttccgaaagaacaccggccctatggtctcaatattccccagtctgtgatggtcaatgatctccacgatatcagcttcttcgatgccgtccactgcctgggacttctcattgtgatccacaaggatcaccttcttcttgcttacatccatgaagcgccgcctggagataaagcccttaaagcggccatgccggtccagtatggggaagtcgcggaactttttctttgtcatgacttccttgatatcttccacgtagtcgctcatacggaaggtaaccagaggcgtcttgctcataaaatgcttgaccgggatgctctggttgatcagcctggctgccgtaaatgtatcatgaggcgtgctgataatgacgatgcttctttcttctgccttctgcaccagttcttccgataccttggctccctggcagaccaccaggcagctggcatcaatatctaccgcgcaggcctgggactcgtaccggttccccagtataaccagatcatccttctcaatgaactctgccatcaagtccggattggaggctccgatcgccaccttcccctttgtaaaatagccgtgctcattgccggtgaccaaggtgccgtccaaggtcctgatgatattcttgtactgcgtcttagcgtctgaaagtacccggttatcatagacatccatataagacgtggcaatgtcccctgtcgagatgacgccgaccagttcctcatccttcaggatcggaatggtctttacattgttttccttcatctttgcccaggtgtctttgatggacacatttggctcaactccatcaatcttatgtatgtccatgtccttgacctgaagcttgacattctgaagcagatccggcgcgtccaccttgaatttctgcagcacgtaatgcgtctcttcattgatctgccccgctcttttcgcaacgtattcattccccgtaacttcgcgtttcaagtgcgcgtatgcaatggccgagcagatggaatccgtatccggattcttatgtcccacaatgtataccttgcttgatttctttcccatagttcaacatcccctaatcataagttcttaaagtaagagtgccatctttttagggtttcgtcaaccacaaattccagaatatgtgtttttttctttgaacatacctgccattatatgctatactagaaacagcatgtgaaagcatatgagtcttactattaggaagggataatactatgagcgaagaattattacaagaagaagcaaagcaagaagaaacaatggcagatctggaggaatatttcgacgatgccaatccatggaatctggtgcagtcatatatggacaacaagaccgttcttccggtaaaggtagaaggtatcgttaacggcggcgccattgccatggtagagggactgagaggattcattcctgcatccaagctgtccttatcttatatcgaggatctggagacgtatcttttaaaggatatcgaggtcagggtcatcgacgtagaccaggcaaacaaccgcctcgtgctgtctgctcgtgaaatcctcaaggagaaagagaaaaaagccatggaagaaaagattgccaatgtcaaagtaggcagcgttctgaccggcaaggtagaaagcctgcagaactacggcgcattcgtacgcctggaagacgggctgtccggcctggtgcatatctcccagatcagccagaagcgcgtgaaatcaccgaaagacgtgctgacggaaggccaggaagtaggcgttaagatcattggcgtaaaagacggcaagatcagcctcagcatgaaggctttggaagaggtacaggaagaaccggtagaaaaagtggagattcctaaatctgagaacatcggaaccagccttggagatctgttcaaggatctcaagttctaagaaacgaacagaaaaagaataaggccggaatcggcgcctgccatggcgtcagatcccggtcttattttcttaaaatgcttttgcctgccctttgtcaattttctattctgctacgactcttgtccaaattccatctcatcaatcagcgcagccgcgtcctccacgcattgggtacagcagatcagcggctgaggcccatccatgttcttaagatcccggcaatagatggaaccgttcttttccgtaaacttcctggcagcctcccggaatctggcataggtatccatcttggtcttcagaggatgttccatatcgccggcgctgtttgccaggcttatcaccaggaacattcccgttacggccccgcaggtatcccgaaggcctcccatgccaaggccgaacccttcggtcagccggaagacatcctcctccttgacgcccagttcctcgcagtatgcgcaggccactgcctggcagcaattgtaaccttgcttaaactttttgacagcaagttctttattgcccttcattccattcatctcctttacttcttgcgttccttttctaattcttccagccatacatctgagcaggcatcgcttggcattctccagtctcccctcggcgagagggccacggttcccacttttgggccatccggcaggcaggaacgcttgaactgctgggtgaagaatctccggcagaaagtgtgaagccacttatagatggtctcctcatcgtactctccttcaaaggagcgttttgcaattcggtatatctttcccggctcatatccgaatctgagcagatagtacaggaaaaagtcatgtaattcgtatggccctaccagatcttccgtcttctgcgcaatctctccgtcctttggaggaagcagttccgggcttacgggcgtgtccagcacatcatagagcacggcttttagttccgcatcctcgcaggagtccgcatagtagtgcaccagatgccttaccagagttttgggaacggatgcatttactccatacatggacatatgatctccattgtaggttgcccatcccaaggccagttccgacatgtctccggtaccgatcacgattccgcctgcctggttggccacatccatcagcacctgggtccgctcccttgcctgggagttctcataagtgacgctgtgatcgtcaagatcatggccaatatccttaaaatgctgctcgacggatgctccgatcgggatctctctcaatgtggctcccagcttgcgggacatcttgcaggcattctgatacgtcctgtctgttgtcccaaagcagggcatggtcaccgcaacgatgtcttttcgctccatcccgagggcatcgaatgcctttgcagtcaccagcagcgccagggtagaatctaagccgccggagattccgactaccgcgcttttcgcccttgcatgggagatccgcttcttaagccccatggcctggatcatcagaatctcctcgcagcgccgcgctcgctcgccttcttcttccggcacgaagggcctggaaggaaacgtcctggtaagcgcggtctcctccttgcagatcgtaaatggtatgcggatcagcttcggctctttcgcagtctggaaggtggtattcttccttctctccccaagcagacgcttgatgtcaatctctgtgtagataaagccattttcaaagcgcctgccttctttcagcacgctcccgttctcggcgatcagattatgtccgccaaataccagatccgtggtagactccccttctcccgcatttgcatagagatatccgcagatcaggcgggcggactggccttctatcaaatttcttctgtaggtggattttccgacggtctcatcgctggcggagcagtttgcgatgatcactgccccttcccttgcggcctctatgctgggaggaacgctggaccaggcatcttcgcagatctctgcggaaaccaccagcgattccatggaatctgccacgaacagaagctgtggtccaaagggcatcttctctccatcaaacagaatctcccttgccgcagacggtccctcggtaaactggcgcatctcatagaattctccatagtttggaaggaagcttttggtggtcaggcctaagatctttccctggttcagggcagccgccacgttgtacagttttccctccaccgccacaggaacgccgataaagatcagcgcgtcctttccttttgtatggctcgcgatcttatggagggctgccctagcctcttgaagcagtacttcctgggtaaacaggtcgccgcaggtatatcccgtcacgcacaattccgggaatgccaccaccttggctcctcccttgacggtctcgtcaatcaggccgcagatcttttctgtattataggtaacatccgccaccctgatatccggagtggctgccgctacctttacaaatccatgtctcatcttcatcctcccgctttcttatttgctccgttttatgatttctttcagttcatccactgaatacttatatgccgcattacagaaatggcattttacttcaatctcttccccgtcatcgatcatcttctggatctcctttttgcctacgcttacgatcgccttttctacccgttccttggaacagttgcagtaaaaccgggtcggaaccgtatccgtaatctcaaggtccaagcctgacagaagttcctccagcagttgctggggcgtatagcctcgatccagcagttcagtcacggaggtgatattcttaagattctcctccagcctggcgatcgtctcctcctgcgcaaatggcatcagctggatgatgaatccgccggcgcggcgcaccgtattgttcttattcatcagcactccaagtcccacagaagacggcacctgctcagaattggcaaagtaataggtcagatcctccgcgatctcgctgctgaccaggatcgtctgtccggagtatggctctttgagccccatatctttgattacctgtaaaagtccgatgccgacagcgcctcctacatccagcttcccgtttttagccggaagcagcacatcaggattattgacatagccttttacattggccttgctgtccgctgtaacggttatcccgcccagaggcccgtccccccggatctggagggtcagcatgtccgtatcattcttcatcatgctccccatcatagcgccagcgctcagcagacgtccaagagccgccgtagccacagggctggtgttatgatgctcccttgccgtctctaccatttctcttgttgtagcggcaaatgcccggatctggttatttgccgctgtcgctcttacaatataatcttccattctcatactccttttttattttccatattcctgggcaatcacgcagatgcgctcgctgtcatacatgggcacatccctggtataggcatcataagccgtaaggtatctaagccctgcccgctcgatcagattctttatcttttccaaagtgtacgccttctggtaatgcgcctcctggtatttccggtacagttcaggatcttcctggctctgcacaaacaaggtcagttcatattcattgatcccctgctcctcatcataataattatcccagataaaactacattcctcccgctcttccgcgaacgttccatctcccaatacttcccggtatttatattctgtattaaagtcaaagataaatataccctggggatccagataattattcaccagacggaatacttcctgtaattcttcttcatccgtcacataattcacggaatcgcagacgcttagcaccgccctcaccgtgccatacagttcgaactcccgcatatcctgcagcaggtacaggatgtcatggccgctgttcaggcgcttttccatggcaatttccagcatatcctcggaattatccacgcctatcatatcatagccctttgctgagagcaactctgtcatgcttcctgttccgcagccaagttccagcaccagcccgtcacttatctggtactccttcaacattctttctatataatctgcccactcgtcataaggcacattgtccataaacgtatcatatacttcggcaaaattcgtatatgcttccatcccttcactccttttatcctgacactcccacaccatatatagtataacagaattatccaaaaagtgtatagaattatgcacagaagatgcccggaaaatcaagagtgattccccgggcatcctgcctgcgtgctatgattatttctctgtgacaaatacgaacttcacttctccgtccatgccgtcagaaataccggcaaagttcttatattccttggaggcatccagcatgccattgagcttatcaagcattccggatatatctccgtcaaatgcgctgaccagtttcttaatgccatcctcgttgaactggatcatgccttcgcttaaggctcctgccccgtcatccagctgtgtcacgccgtctaccaaagcgccggacccggactttaacgcgccgattcctgatgcgagcgctcctgctccgctgtttagatcctttgccccggaggaaagttttgtcgttcctgtcacaacctctcccgctccggctgacaagtcattcaggcccttggacagcgccagtacgccgctctttccatctttgccgcgaagcagcatgcctgtgccgcctttgagtcttgccacgccattattcaactgctctaccaggccgccctcgccattgacctgggcatccagggctgccgtgccatctcttaagctggtattaagcgccgcattcaattgggaggagcctgcttttaccgtctcgcctgccgttgaacttaaggtttcatacaaaccggtgattcctgctccaatcgttccatctgtcgcgctggaagtattgagggttgcgcttaagcccttcaagccatctgcaaccccctgtgcagtaggccctattgcggcttccaaagatacgctctgggttaccggcacctgctgcggagcctccagctggctgatgatattttcaatggtctgcgcattttcctccgtcttaagcgcccttaactgggtgatgacattgctgctgtcattaaaagccgccacagaaacctccgtgttaacggtaacctggccattctcccctatataatccgcaacctgctgcgccgcttctgccagatcgcctgccgtgtcggatgctctctgaatgccatcctttaactggtctgctcctgtggccgccgcatcaacgcctgcatccagactcttagccccgtctcctgcctgggccgcgccctggcttaattgcttcacgccttcagataaccgcggaatcccctgacctaactggttctgcatatcggatacgccctggtccagcgcctgtacgcccggaaccagctgcttcgccgtgctgtccgcagcattggcggctcccgcggccacctggcctgcgccgtcctttaatgcgcctgctcccgtctggagcgtattggttccatccttcaatgtcttgctgccggttgagagttggtctattccatcaatcaatgtcccggaggaggccagcagcgtgtcaagcccggctttgagttcgccggagccgctgaccagctggtcggcagcgcttttcaactgtcccatggaatcattcaagtcatccaggctgccaaactggtctgtatccagctggttgaataagtcattggtcgcgacggtaatcccttctatggtgtcataatccgtcacgtccgcctccaccacgaaggaatccggaatatccagatcctctacgcccaattcttccttcatctttggaattcccatgccaatagccaagtctttgcttccgtcggatacgatctttccattgtcaatggtcacattggagaacttctccgtatccagcatcaggccggtcaccataagaaacggcgtgtatgcctgattcttatctgccgtggtgttctcatactcatagtggatggacagatgtccgctctttcctttcagttctttttcgctgatatcctttccgtccagtttataggagatccggatgcctaccggaagttccttatccgttgttccctgatagcagatatccttatgatccccggaccataccaggctatctcccaactgcttgaacttctcatcgcccttcacattttcaatttccttaagatcagacacatcctggatctgcttctggctgctgacatttttcaactggtccgaaaccgtgacgcttgtcacctgcccgctgccgtccactttagcgaatacggtctcatcttttctggcattagcgccagaaacgttctcagaagccgactcctctttttgatccgacgctgtcttggcctcagataccactgcgctattttcttttgcgtacacgtaggaaggcgtccctttcacgctgcttactaccagtgacatcatcaaagcgaatgtcaacaatgctctatattctctgttcttcatgattcctacctcctgattaagcttttactacgctatcttttactttattcgtcttctttaccttgcctctcatatccagagtcgtcttgcagatcgccccgtcaaataccatcagcatggatgggagtatgaagataaccgtaaacatgctgatgatcgctcccctggccatcaacgtacataaggctgagatcatatcaatgtccgaataaagccctactccgaatgtagccgcgaagaatccaagggctgacacgatgacggatgagatggacgtagaaagcgctatgcggattgcctctttcttatcctgtcctctgcaccgttccttcttatagcgggtcgtcatcaggatcgcataatcaaccgtagcccccaattggatggtgccgattacaatggatgcgatgaacggcatcttggttcccgtgtaataaggaatccccaggttgatgaagatcgcaaattcaatgactgacaccaggatcaccggcagcgatatggacttgaataccagggcaatgataataaagattgccactatggatatggcgcttactactttgaagtccttatccgtgatcgtaatcagatccttcgtgcaaggcgcctcgccgatcagcatggcggacgaatcatgtttcttaataatgttgtttaacttcgtacactgcttattgaccgcgtctgtcgccaccttatactctgactgcactaggatcagctgataatttcccttccgcagcgcgtctgtcaattcatccgggatcatatcccgcggaatcgcaggccccagaaggctgtcaagtcccagcgcaaatttaacgcccttaacgtcggacatctcatccagcatggctttggcctccttcggagcaagatctgcatccgccagcaccatatgggtggcattcatgtcgaactccttggacagtttttcattggccttgatgctgtccagatatttcggaagggtagcatccagattgtagtagacctctgccttggtatagccccaaagcgccggtcccagcacgatcaggaaaatagcgataaacacgccgtaatatttggaaatcatcctggccggcttttccatctttggcatcagcgatctgtggctcgttttctgaattgccttgtcaaagatcagaatcatggacggaagaagcgtcacgcagctgataactccaaagattacgccttttgccataacgacacccaggtcttttccaagagtgaaactcataaagcaaagggcaatgaaccctgccaccgtggtaatggaactgccgaccaccgaagaaaacgtgttggatatggcatgtgccatggcccgttccttgtcatccgggaaccgcaactgattctcctggtagctgtgccacaggaagatggagtaatccatggtaacgcccagctgcagcaccgcgctcagggctttggtaatataggatatctctccaaggaaatagttggttcccatattgtataggattgccattccgatgcttgcaaggaagaataccgggatgatccagcagtccatgaataaggacagcactacgcaggataagacgaccgcgatcagcacatacagcggagtctccttttcagacaatgccttgatatcggtcaccaccgccgacatgctgcttagatagcactgcttgttcgtaatgctcctgatttctgtaatggcatccatggtactgtcggctgatgtggtatcatcaaagaatatggccatcagcgtggcatccttcgtattgaatacgtctttgatctcgcctggcagcgcgttgatcggaagttcggacacatcggcaatggaatcataccagatgacctccgccactccgtccaccttttctatcttatccttgaccttggcctcctgctttgtggtcatgccttccacgacctccatcgcaaatgcgcctttgccaaagtccttcatcaggatatcctgccctttcatcgtctcgatattatccggcagatagtacaggatatcataattgactcttgtcttcaggtaccccagcgctgatggaatcagcagcagcaggccaagtataaatacgacaacccggtactttactatcttcttcccgattttcaccatcatgactaacccttccttccattcttttcgtagtttgtatcaattatgaccgatagtcatttattactgtaagaactatacacctaaaatgactaacagtcaatactttttttgacttttagtcatttttctgttatactaatagcagacaaaggaaaactctggttataatagaagccaaggagcacggatattatgggaaaagtagacgaaaacaagaaaaaaaagaaggaagcgctttttaataccgcctatgaactgtttaccaccaaaggcatcaactccactgctatctccgatatcgtagaaaaggccggggttgccaaaggtaccttctatctgtattttaaggacaaatacgatattaagaacaaactggtagcccataagacccatgaattattcgacaaggcaggggatgctctggaaaaatcgaacatccggggattggaagaacagttgatcttcattatcgacaatatcatcgatgccttggtagataacaagccccttttgaactttatctccaagaatctggtgatgggcgccttgcgctccgccctgattacgggcgaggattcggatggagatttctatgacaagttcttaggcctggtcatgcaggatgagtatgactatgaagacgtagatgtcatgctctttaccattgtggaactggccggttccgccggatataattctatcctcttcgaggagccgctgccaatcgagcagtacaagccctttctgtatcggaccgtacggctgattatcgcaagccaccggacgaattagacggcatggccgtcgcctgcaataagtgcggatgcaaaaaagttgggcgcaaagagccagccggaagtcagggacatttatcgtctccgtccttccggctggctttttattcgttctctttaaaactgcttcttcttcacgatcctaagggagatgccatcttactgctgtttttggcaactgctagaatacgaccatcagcagcatcttaaaccgctcctccccgtagaccgcatgaggcttcctggctggcatgacgatgctctgccctgcttttaggatatgctccctgccatcaatcgtaaagcgcccggtaccctccagcacggtaaccatagcgtccccgccggattcgtgggtgctgatctcctcatccttttcaaatgcgaacaaggtcacgcttaccgcgctattctgcaccagcgttttgctgactacctggccctcctgatacactaccagatttttcagttccaatatctcttccttatcaatattcttatatcctaccattgtctatccctttcttatgatatttttttaacgggacacgtaacaaaattgcattttgttacgtgtcccgttattttcttaacaaattctgcagatccatccttccggcgcctcgatctggcccatctggattcctgtcagtgtctcatacagtttcttcgtaaccggtcccatctcttccattccgctggggaagcagatctccctgccatggtccactacttttcctaccggggagatgaccgccgccgtgccgcacagcccgcattccgcgaactcttccacctccgccaaaggtacttcccgctcctctacttgaagccccaggtaatgctctgccacgtacatcagggaccgcctggtgatggacggaaggatcgtgtcggacttcggcgttatcaccttgtgatccttggtcacgaagaggaagttggccccgccggtctcctccaccttcgtcctggtcgccgcatccaggtacatgttctcgtcgtatccctcccggtgcgccgtcatgatggcatgaaggctcattgcgtagttaagcccggcctttacatggccggttccacgcggcgccgcccggtcgaagtcgcataccttgatggtgatcggctttacgccgcccttgaagtacgggcctaccggcgtggcaaatacgcggaactgatactcgcttgccggcctaacgccaatcaccggactgcttccgaacatatagggcctaatgtagagggtcgcgcccgagccatagggcggcacgtacgccgcattggcggccaccacctgcttgacggcctcaacgaaccgatcttccggaaacgcgggcatctcaagcctctgggcggaatctgccatccgcttggcattcaggtccggccggaacgtgacgatatggccgtcctccgtcgtataggccttcattccttcaaagcaggtctgcgcatactgcagcacccctgcgcattcactaatcacgacattggcatcggaggtaagagtcccttcgtcccacgctccatccttatagttggaaacgtatctcttatctgtgggcaggtatccaaagcccagactagaccagtcaatgtttttcttatccattttaaattcctccgtccttttataacttattttcctttttttattataataccggcttttccaaaattcaagagcgcactctgtttttttcattgaaacaatctgtattagatctgctagcgctccatcatgctgatggattcgattccaacgcttcctccccggactacttcgatgctggcgaattcttctttcatcagcttgattaccgcatcgttcttggtggccgtctgcacgaattccagcagaatactgtctttgccatagtcgatcacctttgccttgaatgtctctgctatctgaaagcactccaccttgtcttccggcatgcatttgcgcacctttacatagagaatctccttcatccggacaaatacatccgtaaaatcaatgacctttattacttccaccagccggttcaactgcttcttaatctgctcaaaggtctcatcgtcgctgaccgtcgcgatggtcatacgggacacggtaggatcctctgtagttcccaccgtcagactgtccagattatatgactttcccgagaacaggcccgagatctttgacagtacgcctacctgattttctacatacagcgaaatccaacgcttcttcattccatttccattcatattcatatcctcccttctagcaatccagtatcatatcttccaaagtcccgcccggctgaatcatcggatataccagatcttccggatctatctcgaattcaatgacggtcggcgtcttcgtgctcttcattgcttcccggaacgcgggttcgatctcttcctttttcgtcaccctgattccctttgctccataactttccgccagtttcacgaagtcgggcgtgtaagcagggcattctacctccccgcatttgccgcggcatgccgctcccgagcgcaggcaggtcatggaatagcgctttccatagaagagtttctgccactggcgtaccattccaaggttattattgttgaaaatacaggatatgataggaagttcttccagtacggccgttgccagttcctggatattcatctgcattccgccgtcccctgatatggaaatgaccggcatgtcaggattgccgatcttggctccgatggctcccggaagcccatagcccatggttccgagccctccggacatcaaaagctgcttattggcatccaattccatgaactgggcaacaaacatctgatgctggcctacatccgtaacaacgatggctctttcaaatacacggttcatcgtctccaggatatcttgtggcgtcatgattggcttcttcttcatcttcatagggtgctccagcttccactggcccacttgctccagccatttctgcgtattgcactccgtcacatattccagcatcttttcaatcgcctcttttgcgtctgctacgatgggcacgtcaacctgcacgtttctggagatggctgccgtatcgatatcaatatgcacgatctgagcacggggggcaaatgaatgtagttttccggtaatgcggtcattgaacctcgtgccgatcgaaaacagcagatcgcattcattgacagccatgttggaagcatatgccccatgcattcccaggtttccaatatacagcggattgctggtaggtatggcgcctcttcccattacggtagtgactaccggaacccctgtcttttccgccagccgggtaaattcctggttggcatgagcgatatttacgccgccgcctgccaggaaaagaggacgctgcgccttcccaagcatcttgatggccctctttaactgcccgatatgtacatgcgtgctcggcttatagcctctgatattgacctccgtcggataatctgcgcttccaagctcggccattacatccttcggcagatcaataagtaccggtcccggacgccctgtcctagcgatatagaacgcctccttgagaatccttcccaagtcttcccggttacgcacggtcaccccgtatttggtaatgcttctggtaatcccgacgatatcaacctcctggaacgcatcgtttccgatcagatgccttgccacctggccggtaaagcataccagcggcacgctgtcgtagttggccgtcgcaaggcctgttaccaggttggttgccccaggcccgctggttaccaggcatacgccaacctttcctgtagagcgcgcataggcatctgcctcatgtacaagcgcgatctcctgtcttggcaggatgaccttggtataatcctgcttgtataattcatcgctaagatcaatggtacaggcgcccggatagccgaacatggtatctacgccttcctccctcaatgcttttaccaataatctgttcccgctgattttcttcatatacatacctcctgtttgcaaatgacgtgtgctgcgtagcgaaaaaaacgccctaagcctgacgcttagggcgaataatgcatccgtgttaccacctaaattcaaagagtctcctctttgctctctgccgatacgggaatcctgctaaagcgcacttccgatatcgctcccatataacgctgggaatgcgttgaagtctactcggatcagataactgtcctttcggtccactgctcaaaggctacttccataacttcatcacgaagactcccaccgtccatcttctctcttggcatcagaatattatgtactcctccttgtcatagcatttctctgataattaatgccattatagtagatttaccttatagatgtcaactgcttttcaatatttccttacaaatattcttccaggacagatgggacagatccaccctttcctgtccttcttccctggcgcattcctctatcttgccagccagctgcctctcaaaggccggcagcgactctgataccgcctcgtcggtattgcgcatgacaggcaatggcacatacttcaccactgcgccaggcgcctgctctttcagccagtcccggatccccggaaggtctgtgactaccaccttgtccccgcaggcaatggcttcaatcactgtcagcggaagcccgtcaaaaaaggatggcaatacaaagatatcgcttctttgatacgcctttgccagttccggctggggaagtttccccagaaactctaccggataaggcgccttcgacgccagttcttcaatctcctggtactccgttttatttcctgccccgcctgcaagcgaaagtttcagcccctcccttggataaggcagataggataggctcttgatcagacttttgaccccctttttctctgcaatctttcctgcatagatcaggcggatcgctccgtcctttccccgggctgcgttatcaggcttttccgggccgcagaaaatctcctggctataccccatccccagaatccggatcttcccggaatctatcccgaatatctccatcacgccctccttctgggctgactgaggaacgaagatggcatccagccctctgatctgctcccggatatagtctctccaaagtcctgtctttttcatctgccgcagatccgtattatggcagaatccatagaccttctgctctttgaaccgctcccttgccattgcggtcagcaggtacaggtgatggcacaggatcaagtccggctcaagcgcatccaccgctttttcgatagcttttagaaatgcatcttgaaactgccgcgtcatctcccacgtcatgtcacagtagcgcgtacttctatagggcatctcatccgacatcccgacgatgggatagggaagttccctgctctcaaacagcaccgggaagaaccctacgccttccggcaattctatccggtcttcttcatatacgcctgccactaccgcctgttcgtgcccgtctctagcaaactgccgcaccaattccgtcagatagacgccgcttcccgtactgttaggcttctgagccgtaatgcttagaatcttcatgatatcctctcgtaaatcgtaaatacatattccagatcaaaataggtctgctcatcgctgatcttggtcatctcccattgcggatccacatccaggtccggaaaatgggtatcggcatcatatgcatggtctatcctggtaacataggccttgctgcagtagggaagcagctggcgatagatgctctcccccccaatcacaaagatatcttccgatgcatatttcttcaattccgcaagcatctgttctattgtatggacaatgaccgcgccgttcgccttatagttctgatccgtagtcagcacgacgttcacccggttcttaagaggctgccctcccgggaagctttccagcgtctttcttcccatggcaaccacctttcccttggtcgtctcccggaaaaacttcatatcctgcggaatgctcaccagcagtttgttgccattcccaatggcccagttcttatcgactgcaactatcaaattcatcctactattccctcctgtctcttctctcataccgcaaccggaatgtccttgatctgctcatgcgtctcatagccgatcagcttcacatcgttcctcgtgaattggtagaagtcttttatttccggattcagccagaatttcggcgccggaagcggctctctttttatcagttcttcaatcatcggaacatgcctgtcatagatatgggcatccgcgatcacatgcacgaactcgcccacctgcatatcgcacacctgggcaagcatatgaagcagtacggcatactggcatacattccagttatttgccgccagcacgtcattagagcgctggttaagaattccgttaagcgtcagcctgtcgcttctctgctccttggtcacattaaacgtcatactgtaggcgcagggatacagattcatctcatggagatcctgatgcacgtagatattcgtcataatcctccggctgtaaggattatgcttcaaatcgtagatcacccggtctacctgatcaaacatcccctctttatacttgtgctttactcccatctgatagccataggcttttccgatcaagccgtcttcatccgcccagctgtcccaaatgtggctgtgcagttcgtgaatatcattggacttcttctgccagatccacagcaattcatccgtacagcttttaatagcggtccggcgaagggtcagggccgggaactcttttgaaaggtcataccggttcaccacgccgaatttcttgatggtataggccggagtcccgtcctcccataccggacgcaccttctctcctctggtatctgttccgtggtcaataatatcccggcacatatcaataaatactttatctgcataactcatccgctaaatcctccttttgttgccttttgcaggagcctttcgcccgcgtataccacattgtatcatgtttcgaccgtaaaaaaaagagggactgttccctcttaaacatctgacggcccttcgcttaccggcagcactccatcagcacattttccaaagcgctggcgctgctgctgtgggcgcgctcaaccggaatattatagcgctgtgcttcctttaatgcacagtgcaccatcttatgggccaccgttgaagtaaatagaatgatcagatccggctgtccgatctgcgtcttgaggtttcccgacattctggtaaacacctttgccttgcatcggtagcgtttgcatatctgcttatactgctgttccatccgttcatttccgcctataatcacgacgctcataaatcaccaatccttccttttcgcctttgccatctatgctgccttgcatacaatatcccgaatccgttttccggccagaaactcattgactgcgctgatcttcgccttatcgtaggccaaaaatatcattttggctctttccgggttatgatagaccttccagtagccggtcatcaggcagtcctgtcctcttttgtcgataaagcatttgacatcgtcaatcggatagtccagaaacgccccgatttcatggggaaagcccataccgtcacaagtatattgacagacccttgcagagagtttttgaagaatccagtccaaatctttcctgtcgtatccatacgactccagaaatcttctgatctccctgcgtcccaggtatttttttaatacggcctcccggtaaataaagaccatgcatctttcctggctgactgtaagaatcttagcatcaatcccggttccgtcaagcacccgccaaaattcctttaaatgccgcctgtcaacatttgtgatactggcgacctttattccttttaaaaacggagcgcactgaaggatcagctggaacccgagacgcatcctgatatccttgttagacagcatgtaagaaacaacctctactggcatgatacctccttggttcttttatttttttgattttgattatcatttgcattattaatatatcacattcatcctgattctggcaataccttcctacctagtattttctcaaatccgttcatttattacacaaatatagccgaaccattacggttcggctatattataaagcaccctctccagcatcttttccagtgctgccacctcttttttattcattcccaaagtcagccttttatcaatcttcttccgatccgcctccatccgcttctggatatcataggccttttcagtcaggtagatattcttacaccgcttatccttgttgcttggcacggataatatataccccttttcatccaggcgcttcagcaggcctgtcaccgtgggattctgtagacttaatgctttctcgatatccttctggttcacctcttcttccctggtgtggaacaggtaatccaaaacggcgcactgggaggctgtaatccccagcgtcttcagcctgttattaaaatctttctcatatacattgttaatctgcttaaacataaaaccaattggcatccgttctttcatctattcatccccttgtaaccggactctcctctgctgctaaatatagcatgctatatttagcccctcttgtcaagatgccaaatggattctttagcccgcctgaaaactgccggttgctacccttgtcaccgcgcttttgtaaatcacatatgagataagggtacatacggtagcatttaccagatactgcggaatacggcttgctaccagcgcaaggtaaggagagccgtacagcatggacagggcccaggacgcgataaacagggtcgtcatcatgtatgagccccctataagaatcccaagcctggcgattccgaccttcttaaggaaccagggcctcccaagcccgatcaggatgccaagcacgatcggggagatcataagcggaggatagaagccagtcccggcgatcagacatcccagcgtatccgcaatgcctcccaccagcgccccttccacgggcccgaaccacaatccggccagtataatgaacacgctgccaaaactgattctgatcgtcaatgcgctgaaacccaggaatcttgttgccactatatcaagcgcaatcaatacccccatcatggaaacgtttctgatattcagttttttcataaaaataatacctcctttgcagtagtccttaaagctacgcacagcaggtattacagtctatctgtctatgtgtagcagcgggatgcgaaaaacgtaccgcaagtaatccttacttttcgtcccgccggcaactccccgtccggctggcacttaacgcacgttttcctactctgctttgtctttatctattcgttacggcttcattctatcacatcccgatgcgtaaagcaattagaaattctccgcctgctcctttggcgcctgctggctttccaattgcttcatccttcgaagttccctaagcgcaaagccaatcgcaacaaaggctgctgctccatccgcgatcggtccggcatacatcacgccatcgattcccataaaaaggggaaataggaggatcagcggcagcagaaatattacctgcctggttaaagataccatgattcccagcctggcctccccaatggatgtaaaaaagccggaggacataggctggataccgttgatgaaggtcataagcataaagatgcggaagtaccgctctgcaaaacggaagtactcctggcttcctgtcccgaacacactcaccagctggcgagggaagaactggaagcataagaaaaatacgatgccaaccagcaaggatatcttgaatgccatcataaaggtcttccttacacggctaaatctacctgccccatagttaaagccccagattggctggcacccctgtgatattccgatgcaaattgccatgaacaccatattgacttttgagataacgcccacgcatgccaacggtatatccgtcccatatacggaagacgccccataatgtctcaacgtattgttcatcgtgatctgcacgatggccatagcgatctggttgatacaggcggccaggccaagagaggcgatcgcctttagcatcgctcccttcggcctcagcatatctctggtcagttccagattgcggaatttacaaaaatatataatcaccagaaagccggatatgacttgtccgatcacggtcgccccggccgctcccttgattccccattgaaacccaaaaataaacaaaggatccaggattgtattgatgattgcccctgtaagcatgcaggccatcgaataagtagggcttctgtctgcccggatcagatggttgccgcctgttgtcagaatgaggaagggaatgccaaatgcggtgattcctgtataatcctgggcaaggggcagcacgtccggcgtaacgccgaacagatgcaaaagcgggtctaaaaataccaggacaattatgccaatagaaatgccgctgatgatcaacactgccagcccggttcctacaatctggctggcctttttgctattccctgccccggattccagattatagtttgacgcgcttccgattccaagcagaagcgctgttgccgtgcagatgatagatatcggaaacgcgatattcgtcgccgcatttcccagcatccccacgccttgtccgataaagatctgatccacgatattatatagcgagctgaccagcatgctaatgattgccggtatcgcaaactttgcaattaatttcccgatcctctcggctgccagaggattttcctgtactgctgtctcacccattttattaatactctctaatcacgctgcttatttcgcgggtcgtatccatatccttcagatgctcgatcgcatcctccatatgatattcctttaccgcttctgttacaatgacaagttctgccactccatccgtaattaccttctggatcaccttggatatgcttaccttatgcacgccaaaaacgctggcaatggcagccagcacgcccggcttattatctacctgcatgcgcaggaagaacttgttcttaacgtccttgaattccttcaccagcgtatccctgtagcaggtacagctgattctgccggtacactgataccggatatccctggccacatcgatcacgtcacccataatagcgcttgccgtaggaagttctcccgctccgcgtccatagaacatcacatcgtccacggcatctccgtgcaggaatatggcattgaaggaatctctgacggatgcaaggggatgatcctgggcaatgatcataggatgcacggccacttcgatcccccattctgtattatgggcaacccccagaagttttattacgctgtcgaactctttagcatagccaatatccttcgcggatatctttgtgattccttctgtatatacatctgaaaatgtgaccctggaatgaaaggcgatagaagccatgatcgccaccttccggcctgcatccagaccttcgatatccgcggtcggatctgcctccgcatatccaagttccgtggcttttgccagcgcctcctcaaaatccatcccttcctcaaacatcttggtaaggatatagttggtcgtcccattgacaataccgattacctcgtcaatctcattggatgccagacattgcttcagcggacgtataatcggaattcctccggcaacagccgcctcaaacaggaaatctacctggttcttctgggccgcatccagaagttcccttccgtactctgccaccagatccttatttgccgttaccacgttctttcccgcattgagtgcttccaggatcatcgttctggccggctcgataccgcccatcacctcgatgacgatctctatctgcggatcttcgataatctcttcccacttatctgtcaataaggacgcatccacgcccgctctttccttttttatattatggacaagtatctttacaagttccaggctggcgcctgccttatcaagcagttcttccttctggcgctcaagcagcttatacacgccgcctccaacggttccaaggcccagcagtgcaagttttacgcttcttttttcttccatatattcacatcccttgctctattcgtattggattagtataccacagagatgccggatttttcaatttctttctttttctagattttttcaaaaaagttgttgacaaattatggctcatatagtatattaattattgttctgaggaacacaaaacacaagatatgcgacagtggctcagttggtagagtacgaccttgccaaggtcggggtcgcgggttcgagccccgtctgtcgctcttttaaaaggaattgcatggatatgcagttccttttttatatttattttccggctgacttgtaaaaagtaaattccgtatgataaacagtgccaacagggtggtctggtcaaccggggcattcttcttttccctcttgtagtaaacccattttagtgttatgattgacaacagtgacaataaaataaagaaaggaaacgaagaacgtgacctataaagaagcaagggtatatttggacaaagtgtcgaaatacggaagtgtacttggtttggatgcgattcgggagctgttgtgcgaacttgggaatcctcaggaaagccttaagttcatacatattgccggcacgaacggaaagggatctgtacttgcatacacttctaccatattaagcgaggcaggataccgaaccggacgatacgtatcgccaacagtggtttcctatctggaacgcattcaagtggatgaagaatggatcccggaagatacgtttgccagactgacagagattgttcaaagagctattgtgcgcatggaagcagcagggaagccaagcccgactgtatttgaagtggaaaccgcaatagcctttttatatttcaaagaaaggaactgcgacatcatcgtcctggaatgtggactcggtggggaacttgacgctacgaatatcatagagaatactgtatgtgcggtattcacatcaatcagccgcgatcaccttggaatccttggcaatactttggaagaaattgcacagacgaaatcaggaattatcaaaccgggatgtacggttataactactatgcagcagccagaggtcatgcaggtattagagaatcaggcaaaacgcctgtcctgtcctttctttgtagcagataagcagtactcgatgatctctcacgaagattttacagggcagaccatttcttataaagattacgagaagttccactgtcctcttgccggacgatatcaactggataacgcagtgcttgcgcttgagattatgagaaggcttcccacgcttggatatccgctgtctcaggaagccattcgcctgggattagagaaaacggcatggcccggccgtttcacttgcctgatgaaaaagccgctcttcttcattgacggagcgcataacgaagatgccgccagaaggcttagggaatctgttgaaacttattttccggggaaacggctcatatatatcatgggggtttttcaagataaggaatatgaaaagattgcagccattatggcaccgttagccaagtctgtgcatactgtgaaccttccggatgaacaccgcacgcttccggcagaggaattggctcgggtcatgcagcgccactgcccttcagatgtgattgtacaggcagagccaagcatccaagaagccgggcggcatgcattgtcagaggccgacaacaaagatatcattctttcgttcggctctctctcctatctgggacaaataatagaaactgttggaaaatactaaaattagtattgcatttaaaaatagatacattgaaaaggatatagaattatgatagatcaacaaaaaatcaaacaagccgtcacgcttctgctagaaggcatcggcgaagacgtaacccgcgagggtctgatagatactcctgaccggattgcacgaatgtatgaagagatatacggcggcatggaggaagacgccgccacacacctgagcaaagtattccatgtagacagcagtgagatggtgattgaaaaagacatccctttctattctacctgtgagcatcatatgcttccattctacgggaaggtacacattgcctacattcctgatggaaaagtcgtaggcttaagcaagcttgcacgcaccgtggaagtatttgcaagacgcctgcaattacaggaacagttaaccggacagatcgtggatgcacttatgacgcatatgcagcccaaaggtgtcatggtcatggttgaagcggaacatctgtgcatgaccatgcgcggaatcaagaaaccgggaagccagacggtaaccgttgcacgccggggcgagtttgagacgaatcctgtgctggaagaacttttcttccggatgctggggagatcatgaatcatatggagaacacgatgttaagaatttcttatatccgcaagcatcccctatatatatcttcttaccaaagactgcaagaactggagcaagaacgtatcttctgctgccatcagatgaatcatctgctggacacagccagaattgcttacattctgagccttgaaagaggaattggaatttccaaagaagcaatctatgcagcggcaattctgcatgacatcgggaaaggcaggcagtatgagtcaggaatcccacatgaacttgcaagcgctgatattgctgaacagatacttgccgaactgccggaagaacttatgtttacttcgaatgaaaacgaacagattcttacggcaatccgtggacaccggaagcttcgcgagaacgctgaacctctggaagcactattatatgaaagcgacaaggcctctcgcgcctgtttcgcctgtccggcagaaacggactgtaactggagtactgaaaaaaagaataaggagattagaatatgataattggcaaaaaagaatttgacacgcaaaaacatacttatattatgggaatcctgaatgttacgccggattccttctcagacggcggcagattccagactctggatgcagccctggctcatgccggtgaaatggttgcagacggcgctgatatcctggacgtaggaggcgagtccaccagacccggacatgaacagattaccgacgaggaagagattgcacgtgtcgtacccgtcattgaaaaattaaaacaggaatttgatatcccgatatcaatcgatacctacaaaagttccgtagctgaagctgcacttcaggcaggtgcagacttggtgaatgatatctggggattaaagtatgatgaacatatggcatctctgatcgtaaagtatgatgcagcctgctgcctgatgcataaccgtaatgaggcggtttatcagaattttcttgcagatttcatggatgatatgcgtgaatgtatccgcattgccactgaagccggcatcaaaggcgagaagatcatccttgatccaggcgtaggattcggcaagaattatgagatgaatctggagattatccgtgaagtcggcaggatgcaggaactaggatacccgattctccttggaacctcccgcaagtctgtcattggtctgactcttgatcttccttcagaccagcgtgaagaagggacgcttgcaactacagtctacggtatactgaacggatgctcctttgtcagagttcatgatgtcaaggcaaaccgtcgggctattgatatgatggaagcaatcctgagagagcatggaatcaaatctatataagagcattcttataactttatagtattttcaaatacaaaggaaagatattatggataagattaagatacagaatttagaagtcttcgcaaatcacggcgtttttcctgaagagaatgtactggggcagaaattcatcgtctcagcagccctctataccgacacaagaacagccgggaagacggataatctgaccgcatccatccactacggagaagtcagtcagtttattgatcatttcttaaaagagcatacatacaaactgcttgaacgcatcgcagaaagtctggcagaagcattgcttttgcagacttcagggcttgaaaagatccagttagagattaaaaagccatgggcgcctgttggtcttcccttggaaaccgtttctgttgagatcgaacgcggctggcacacagcctatatcgcacttggctctaacatgggtgacaaagagcaatatctgaatcaggctgtaaagtctctgaatgaggcttcctgctgtaaagtggccaaagtctcctcattccttgtgacaccgccttatggcgtcactgatcaggatgattttctgaacgcctgcctggaacttcgcacattactgacaccgcgggaactgcttgacgaactccatcgaatcgaaaaagaagccggaagggaacgcatcatccactggggtccgagaactctggatctggatataatcttctatgatgatctgattctacatgaggaagacttctgtattcctcatgtagaagtgcagaaacgtgactttgtactgaagccgcttcatgagatcgcaccttataaacaccatccctgcagccataaaacggttcgtgagatgcttgaggagcttgtgtaaataccccttcgtccacgcagatgaagttgtcttcgttcttataccagatcctcttcttttaacgccagccctaattcatccaactgctttgtgtcaaccagatttggcgccgcggtcatcaggcaggaggcatcctttaccttcgggaatgccattacgtcacggatgctgtcttccttagccatcagcatcaccaggcgatcaagcccataggccagcccggcatgcggtggaacgccgtatttgaaggcatccagcaggaatccgaactgctcctgcgcctgctccttggtgaagcccagtgcctcgaacatccgctcctgaacgtcatcctggaagatacgcacgcttcctccgccaatctcattgccgttcaaagtgatatcataggctttcgcgcgcacacggccaggatcgctctccagatagttaagatcttcctccatcggcatcgtgaatggatggtgcatagctacatagcggttctgctcctcgctccattccagaagcgggaattctgtaatccacaggaacttatactcgtccttgttgagaagttccatctgccttgccagttccagccttaagctgccaagaacatcccagaccactttattcttatcggcggcgaagagcagcaggtctccggcttcaccattcattgcccggatcaacgcattcatctgcgcttcggtcatgaatttggcgaaggaagatttgacatttccgtcttcctggattgcaatataggccagcccctttgccccaaagcctttggcaaagtctaccagtttgtcgatcttctttctggccatgcctccctggcctttggcattaatgccgcgcacagtgccgccattttcgatggcccctttaaatacgacaaactcgcagtccttcacgacttccgtcacatcggtcagttccattccaaaacgggtatccggcttatctgagccatatctgtccattgcttcctgccaggtcatccttggaattggcagagcgacttccacgcccagcacatctttgaacagttttgcaagaagtctttcattgacatcgataacatcatccacatccacaaaagacagttccatatcgatctgcgtgaattccggctgccggtcagcgcgaaggtcttcatcccggaagcatttggcaatctggaagtaacggtcgcatccagaacacatcaacaactgcttgaacaactgtggagactgcggaagtccatagaactgccctggatgcacgcggcttggcaccaggtagtctcttgcgccttccggcgtgctttttcctaagatcggcgtctcaatctccagaaatccttcctcggaaaggaactgcctggtcaatgtagccactctgcttcgaagcagaaggtttctttgaaggtcaggccttcttaagtccagatagcggtatttcaggcgaagttcctccttcgtcttggaattctcctcgatcgggaacggaggtgtttctgcctcggatagtatccgaagttccgtcgggatcacctcgatctcgccggtagccaggttctcattgaccgccccagagcgctttgagaccgtgcccgcaattgcaatcacatattctgaacgcagtctcgctgccttttcaatcagcgccgcatccgtgctgccttcctcaaagactacctggatgatgccactgcggtccctgacatcgataaataccaggcctcctttgttccggttcttctgtacccatcccatgatcgtgactgtctcgcctgcattggctatggacagttccccacatctatgtgttctctttaacccattcattgactctgccatattgcttctctcctcttatcctattcttttgccactttacaactgatctacagaatctgcatagcagtcgatgatttcttcatagccttctgcctgcagctgttccttctggaacttcttgttcttcttcatgttgacaatcagcacctgttttcctgcttcccggtccgtttttgccatggctaataccttgagcattccttccttgggcatgttcttttcaagaaggtatgccttcttagcgccttttcttggaacctcgtatccattttccagcagcagcatgacgattctctcaaatccaatagagaatccgcaggccggcgtatcctggccggtaaacttcccgatcatcttgtcataacggccgccgcctgccacggaaccgccgaagtcgtccatcgtcacctcgaatatcgtccctgtataataggactgtcctcttaccagcgtaggatcaaaacggataccaaactttgcttccttggcttcttccacgcttgagataatcgtctccatcccctcagccgtctctgatgaaaggcagcagccaagtttctctttcagataacggataccttccacatccggcgttacctcgtcgaacagaccaagataggtatccacgctttctttgccataccccagttcctgcagttccccggccacgccttcttttccaatcttatccatcttgtcaaggacaatgaagacttcgtcataatcttcttctttaaaaccgctgtaggcggccattgccttcaggatgttcctgtcattgatgcatacggtaaaattctgaaagttcagtttccccagcatggccgtggtggcgagaatcaattcgatctctgccagtatgcccggctcgcctaagatgtcgatatcgcactgcataaactggcggaacctgcccttctgcggacggtcagccctccatacatttccaatctgcatcgccttgaatggcgatggcagctcgctcatatgatttgcataatatcttgcaaggggcacggtcaagtcgtacctcagtcctccgtcaaccagatcattttcctcttttgcctcgtctatcttcaatttctcgccgcgctttaagatcttgaatatcagtttttcattgtccccgccctgcttgctgcagagattctcgatatgctccacgcaaggggtttccattgatgagaatccataagtcttgtaggtttcttttatgaggtggatcacgtaatcacgaatctccatttcttttggaagcatgtccttcattccggtaaccggtttcttctttaacgccatagccattctccttttcgttctatcatttcatcaatccggtctatataggcatcgatcgcctttacattctcgatccgcatcagccgcgtcatctttttctttctgctgccaggcatgggtattatgccttttagtacgatcttcgtggatgcgcctgcgccagcggcaactatggattgcttttcctccataataagtatattgtatattcccgctttgtcaacctttgcatagccaacattttcgaaattccccacaatattcttctggcgatacaaataatatggggccagtcccatctgccttgccaggcgctctgctgaccgaatcatgcctgacatgacttcatttgtcttcccgtcctcccgcttcagatcctccatatccatccttgccgcccttttgatggcaagggaatgcaccgtcaggctgtccggcataagccggccaatctgcctcagggtatcttccatatcatggagatcctctcccggaagacctgcgataatatccatattaatattgtcaaaccccagttccctcgccatgccatatgccgttatgatctgctctacgctgtgcctgcgcccgatggcatccaacgtcttttgctgcatgctctgcggattaatggagatccgggtgacgccgtgacgtctgatcgcttctagcttctccctggtaatgctgtccggccgtccggcctccaccgtatattccagaagatgctcccttgagaagttctcgtcaatacagcacaggaggcgttccagctgtcccgccgtaagcgtggtaggcgtgccccctccgatgtagatagtattcagtttctttaaggaggacttctgagcgataaacttcaactctttgcacaaggcatccagataatcctccaccctgctttcccagtcggctaaggccccggaactaaaggagcagtagctgcacacggtgggacagaacgggatgcccacataaaggctgtacccattgtcatagtccagccgctctagcagttccttctcccttccggcaatctcccatgccagggaagccttctctttgcttaccatatagatctcgtgaaaccaggagacaaatgccttctcatccatcccctcatccagcttcttcatggcaatcttcgtaggcctgactccggtaagaatcccccaggaaagagagttccccgtctcttcttcaagcaggtgatataactttacgtctatatgccgtttaacttctgcttcttttcctatccctgaatattcggcgggcatatccgccgcgcctgtcgtgatcttgcgcccattctccagcagtaccgttacataattagaggctttttcctccacccggcacacagcctgtgccgctggataaaaagccttaatcatatggtacgtattataagtatatgcctcgctgttacatataatccgaatcattcttataccccgctacagaaatggattgtgcgtcttctcatgcccaatcgtagtctcgcccatatgccccggatatacaagggtctcatccggaaggaccatcagtttctccttcacggcccgcaccaggtcggacatgcttccgcccggaaaatccgtacgtccgatcgaattctggaacagcgtatccccgctgaataagactccttcggatctgacataatagcagcatcctcccttggtatggcccggcgtgtggaacacctcaaagtcatagccagccagtttcagaatctgtccttccttgatgctcttagctccttcataagtatatcccccggtatagacagaagactggtttaacttcggatccgtcatagcatccgcgtcttcttcatagacatagaccggcacatggaattcgtccacgaatccgtcaattcccataatatggtcaaaatgggcatgcgtcagtagaagcgcctctatcttaattccttccgatttgatgtggcttagaagataggacggacaggcagccggatcaaccacgaccgcctgtcttgtctcttcatttaccgccagataacaattagtgctgataattccagtaacaaatctctctactttcatcttttctatcctgtcgtcctttcaatatcaattacgccctccacctgacgaagtttcttcacaattcttgtcagttcttccctgccatgcacgataaatcccgtctcaatggtagcggttccctgcttgctggtgcgtacattcatggacttcacatccacgtctccttccgtaaagatctttgacatctccatcaaaagcccttgcctgtcatgggcatacatcttgatctcagccagatactgcccgccggccttctctgccacgtcgctttcccactccgcatcaatcaggcgggcgcgctcggattctgtcagatggatcatgttcacgcagtccgtgcgatggatggaaaggcctctgcctctggtaacaaagcccacaatctcatccccgggcaccggattgcagcatctggagaaacgtactgccatatcgtcaattcctttgaccacgattccactcttggacttggcaatatgcaccttattcttggacgcttctgcaacccgctccagaaccacttcatccgtgatttcctgcttgtgctctttgtcatactcttccacaagccggtttaccacctggccttccttaagccctccgtgcccaatggcagccagcaccgcttcccagtccttgaatccgtatttcttctgcaccacgtcctgatatttcggattcatgatattgctcaaattaatggatttggctttgcaataagaggcaatcatctcttttcccttgatgatattgctttccttgaattctttcttaaaccattgattaatcttgttctttgcctgggtgctcttgacgattcccagccagtcccggctcgggcctctggagttctgggaggtcaggatctcgatcctgtccccgttctgtatcttgtattcaatattcaccagcttgccgtttaccctggcgcctaccatcttatttcccactgcgctgtggatggcgtatgcgaaatcaatcggcgtagagccattgggcagattcttcacatcgccttggggcgtgaagcagtatacatcctctgcaaacaggtccagatcgcccttgatcaggcttaaaaactcccgattatccgacatgtctctctgccattccagtatctggcgcagccagctaagcttctcttcttcctgcgcctccacgctcttcttgccatcattggattctttatatttccaatgggccgcgataccgtactctgccgtcttatgcatttcctgcgtcctgatctggatctcaaaaggctgccccacggaactcatcagcgtcgtatgcaaggactgatacatattgggcttgggcatcgcaatatagtctttgaagcgtcccggtatcggcgtatacatctcatggatgacacctagcgccgcatagcagtcctttacggagtccacgataatccgcaccgcgaacaggtcatagacctgatccaccgtcttatcctgattaaccatcttcttgtaaatgctgaagaaatgcttgacgcgcccgttcacatccgccttgatgctggcgttcttcatgtgggtggacacttcatccacgatctgctggacgaattcttcccgctccgtcttccttgcgttaatctgatttacaagatcaaagaatacttccggctgcgaatacttaagagccaggtcatccagttccgtcttaatcttggatatgccgagccgctgggcaatcggcgcatagatatccatggtctctttggctttctccttctgcttggccggcgtcataaactccagcgtccgcatgttgtgaaggcggtcggcaagcttgatgatgatgacccggatatcctttgccattgccaggaacatcttccttaagttctctgcctgtacctccaacttgtcggaagaataggaaagccttcccagcttggtgacgccgtctaccagaagcgccacttcctcgccaaattcccgtttaatatcctcttcgcttacttccgtatcctcaacaacgtcatgaagcatgccggatacgatcgtctctttatccatctccaggtcagccagtatgatggctacccacagaggatgcacgatatacggctctccggacttgcggcactgccctccatgggcttttttcgcaagctggtatgccttttcaatcatagaaacatccgtagaggggtgataccttcggatgcgggcaatcaacatttcatataagcgatccggattttcatagtctcccggcgctttaacggcatgaccgtcaacgacttccagtcctgcggaggcatctgccgtcagcgattctggcgcaatacgcccgtcaattgcctcatatgtggttttttctgacatattaacgcctccttcctgttacatatttttcttttgttattatttaccaggatatgcaattacagactcaacgtcatatccttttaatttatctctgcccttaagaccctccagctccatcaaaaatacggtctttacgacttctcctcccaggccttccaccagtttgatcatagcctcattggttccccccgtggcgatcagatcatcaataataaccaccttctggccaggctttatcgcgtcacggtgcatctccaattcggcaatgccatactccagctcatatttgattgaaaccgtctcacatggaagttttccctttttccggattggaatgaatggcttatgaaggttataggcaatgggaactccaaagataaatcctcgggactccggccctacgaccacatcgaactccacatcttttaatttttcctgcataaggtctatggcaagcatcagcccgtcggcatcctgaagcacgctggtcacatccctgaatataatacctgattccggaaaatccggaatactccttacgtattcttcaatcggtttcatacacaatctctccattctcactaaaataccttataagtatagcattagtctacgtaattttcaaacaattctagacatttctcgcaccattattggtagtgcgtaatcacaatctgaaccgtacgctttcccatatattcattaatgtcgggataataagtgacggacagcttcatctggcctcctcttcctttcatcagaagatccacagcctctttcccataccgctcttccagaagggaaagcatctgctctgctccccggaagcacacggcctcccttgccgtctgactggaatcttttacctgaagtttcagtacatttctattcttgccaagaatccgcccgcttataagttctacatttctggcggcaaagaccggctttgtattcccctttccgaaaggttccaaaagagtcagttcctccaccagttcctctgtcacgcaggaaaacggcaattccatatctatcactactttttctgccatgtcttttggctccagccggcagttatcattgagcgtccttcgaagttcttctatgttttccttggcaagggacattcctgccgccagcttatgtcctccgaacttggtgaggagatccctgcagcggctgagttcttcatacatattatatgcctctatggaacggcccgagcctttgataccctcttcggcatccgtcagtatgatggcaggcctgtaataccgctcccggatccggcctgccacgattccggccaggctttcatggcagccgggcagatagaggaccagaacccggtctttccctgccttcgtcgtgtccacgatctgtcttgcctgttccaccgcgatatccgtcatctctttgcggctgtcattcagcgccttcagatcccctgccagtatgtccgcctcttttccggatttcgcccgcagcagattaagcgtccgctttgccgtatccagccttccgctggcattcatacaaggcccaagtacgaatccgatatgataggcgccgattcgatccttatccactcccgtgcacgcgatcaaagagcgaagtccgggactatgcgtccgcttcagcatctgcaggccttcctttacgaaaatcctgttttcgttttccagttccatcacatcgcccactgtagcgatcgccacattttcgatcagatagtccagatcctccgcgtcgccgcccgtggcctcccacagggcttccaccagtttataggcgatggctgccccgcacaaccctttaaatggatattcgcaccccggctgctttggatcgattacagcatctgcaggcggaagcagatattttttcccgtcctcttcttcctcgaagggcacctcgtgatgatccgtcaccacgatcgtcatcccaaggcgctttccgcaggcaatctcctccgccgccgcaatgccattgtcgcaggtaatgatggtatctattccatcctgatacgcccgttcaatcaattcgatgttcagtccatatccatccttcatgcggctgggtatatcactgtctgcctcagcccccagtttctccaagccctccagcagtatgtaggtggcattcactccgtcaatatcgtaatctccgatgacccggatccgcttctgctcggcaatcttctcccttaagatgtccactgccttgtccatatccttcatcagcatgccgtcatacaggtcggcaattgtgccattcaggtactgcgcgattgcctcatcgccgatcacatccctgttacggattaagcaggccagcctggggctgatctgaaaccttttcccaatcccttcaaaatccgcgccttttcttagaagcacccattgttccatcctctatcctccctatgtatcttgaaagtaaaaagcagccacgtcatataaatatggctatggctgcttcatcgtttcactctattatttctttttcttcttgcttgtctgggcagctggtttcttgccagtctttgtcttcataacataccacagggctcctgtgatgcacacggacgaatatgctccgcatacaatgcccacgatcagcggcagcgcaaattcacggatggagcttactcccattacgtacagcactgccaccataatgaatgtggtcagggaagtataaatacttctggtaagcgtcattgtaatactcttatttaccacttctgcaagatccgtggacttggtctggtaatgaagttcctcgcggatacggtcaaatatgacgatcgtcgcattaatggaatatcccacgatggtcagcatgcaggcgataaatgtattccccaccgatattctcgcaaccgcatagaatgcaagcacgactaaaacgtcatgtaacagagcggttaccgcgctggttgcaaagcgtatatccttgaatcggaaccagatatacagaagcatgaatatagttgcgacaataaccgcgacaaccgcgtcctgccgcatctcgttacttactgtagaactgatattctctgcagtaatcttggactcatccacgccgaaattatctgccatagcctgattcagtttttcacgctggtcaagttccagcgtaaccgtcttgataatcacctggttggtacctgccaccttctgcgtctggacattgtgatcgccggtcactttttctactacaggcacgatctctttgtcaatctcttcaatcgtgtaatcttcattaaatgtcacattggttgatgttccaccttcaaactcaaggctgtatgcaaatgccccattccccttggatgaattcacgcccatgaagatcagtcctgcggcgatgactgccgtagatacggtaaagaaccatttcttctttccgaggaagttgatggttttcctctccttcttagcacgatagtatagtttttctttgcgaagccctaccgcatagaacgcatacacgatcatacgggtaataacaagggcggtaaacatggatacgataataccgattgccagagtctgggcaaatccctttaccgttcccgagcccttgaaccagaggacagcagccgcgatcaaggtggtgatgttgccatccacgattgctgacatagccttctggaaaccagtctttaatgcattcttcacgctctttccgcgggacatctcctcacgcacccgggcgaagatgatgacgtttgcatccaccgccataccgatactcaggatgatacccgcaatccccggcaaggtaagggtcacgttaaacgcatttaatataagaagcacaagttccgtataaataaccagcgcaaggcttgaagcaagtcccggcagataatatacaaatatcataaagataaatacaatagcaagtccgatcgcgccggccttcagactggtgctgattgcctgttctcccagctgggcgcctaccacgttggagcgtagttcttccagttccagcttcaatccgccgatacggatggtagatgccaggttttccgcctcatcatacgagaaatttcctgtgatatatgcctgccctccggtaatcgccgtctggactctcgggctgctgatcgcctctccgtcatagatgatggaaatggtctttcctacattggcctctgtggcatccgcgaacttctttgtcccttccttattcagactcagttccacggagtactccttattgcccatatcatcctcgccggccttggccgtagcggtcttgacatcggatccggtaatgaccgtctctccatcttccgtcctgaactcaagggagcctggctttccaagttcatccaggatcgcattggcatccgtaacgcccggaatctcaatgttaatccggtcgtcgccttcctggtacacgctcgcttctgtgctgtactgttccacacgcttctgaagcttataaatggtgtcgctcatctctttttctgtcggattgtcatccttaacctgataggtaatgctgacgccgcctgccagatccaggccaagcttgatgttcttcattgcgccggttccagtcttgccaaaaccgaccagaaccgtaaagccaagcagcacgaccagcacgacggtcagaatcaggctcagtatgcctttgttcttcttcatggtttacttcctttctgtctcttcttaatccctttttattcttctgcaagcgccgctttcatcataattgcgcattccacgcgcttacgctgcatctcgcagccaatatcatatgtatcatggatggtcccgtggaaattgtaagaattcgccatacatccgccgctgcaatagaacttggcaaaacagtccctgcacttatctttggagtacacgttgcagctgcggaaatcatccgcaatctccggccttacgattccttcgtccacatttcccatcaggaattctacctgtcccacgaactgatggcaaggatagagatccccccaaggcgtcacggccagatattccgtcccggagccgcatccggacagccttttcgctacacaaggcccaccgtctaagtctatcataaaatggaaaaaattaaaaccttttccttccttttcacgttcaatcattatctttgccagtttatcatattcttcattaatcaccgggatatcttcctcccggatcgcgtagggatcgctttcctctcccaccaccggctctatggacatctgcttgaaccccagatccgcgaaatgcaggatatcgttggaaaaatccaggttatcgcgggtaaacgttccccgcacatagtatcgctcctggttcctgctctttgccagtttctggaacttgggaacgatcaggtcataacttccctttccattgcggaagggacgcatacggtcattgacatccttgcggccgtccaggcttaagactacattgtccatctccttgttcacgaactcctgcacctcgtcgtttaacagaacgccattggtggtaatcgtaaaccggaaatgcttgtcgtggatcttttcctgctctcttccataagccaccaggtctttcaccacctgccagttcatcagcggttctcctccgaagaaatccacttccagattatgcctgttgccggaattggcaatcaggaaatccagcgctttctttcccacttcgaaactcataagggcacgtctgccatggtactccccttcttccgcgaagcagtatttgcaggccagattgcagtcatgggcaatatgaaggcataatgcctttactaccgtctttcgcttcttcacttcctcgatcatgcattcataggcatcctcagcgaatagccttcctgcttccgtcagttcgattacgtccgccagagcatcttcaatctcgccctcttcgtacttctgtcccaactctttcttaaggcccttaagcacgcatggctcttttagagtcttagcggtatgggcttcattttctttgcttaatttcgcaatcacgtcatagcacagttcgtccactacatggaccgcgccgctgtacacatccatgacgatattgtatccattattctggtattggtgaatcaaggctatatacccctttcctatatacattatcaggggccgtcccctgcatccattcttatgaacaacaagaaacagcgacccttaagaccgctgtcccgagtattccatataatccaaaactatttcttctgttcgcaagtctggtttcctactgtacaggaagtcttacatgctgactggcaagatgtctggcattctccgcatccgctcttctttaaattgctattcatagtctgtgtatttaatgtttttacatgtttcatgctctattcctccttacctttgcttaacttatgttattataccatttcattattattttcgcaatcattttatatctcttgttaaaactttaattactccccattctatggcctttttacggtagttatgatacactatcggtggattacagcgtgaacgccaggtactgctatctatagccatagtcttttaaaaagcaatattgcaaatgtatgtcttataggaggtaattgtacaatggcaattcaaattggcatcaacggattcggccgcatcggcagagtcgcattccgtatcgccatcagtcagcctgaacgcttccacttgtgtggaatcaatgtccgtaacgcaaatcttgattatatggtatatatgatccggtacgataccatattcggccgcttccgcggtgaacttggcacttacgagaaggggattaccgtaaacggaaagaagatccctgtcttttccgaaagcgatgcttcctgcatcccatgggaaagctgcggtgccgaatatattatcgatgcaaccggcgctttctgcactactgcaaaggcaatgtcccatatcaaggccggggcaaaaaaggtcatcatctcggcgccagccaaggatgatgagacccctacgttcgtcatgggcatcaaccacaccaattacacgccggatatgaaggtcatatctaacgcttcttgcactacgaactgtctggcgcccatctgcaaagtcctggaggataattatggcatcgaatatggcctgatgtccacaatccacgcggcaaccgccaagcagaaagtagtcgacagccggtctttgaaggattggcgcaccggccgggcagtttttggcaatctgattccttccacaaccggagcagcgaaagcaatatccttggtcatcccttctctgaaggatcggatgaacggaatctcttatcgggttcctacctcggacgtctccatcgtcgatctaaacgtagcgcttaagagcccctcatcctacgaggatatttgcagcaaagtccacgaggcctccatgacatatttgtccggcatcctggattatgtagatgacgaagtcgtgtcctctgattttatcggagactcccacgcctccatcttcgatgcacgggaagggatacaggttaattcccatttctttaagctgatctgcttctatgataatgagtggggctataccagccagattttcagactcatagaatacatggaccagattcatcagcaataacaatttcatatcgtttctatggcagcgatagatagccgaagttactgtaatcaactttctgtaagggacatatgcattcgtaattacgattatgaaccatacaaaactatgtcaaaagagacagacacttttttggagtgtctgtctcttttacgatatcattccgccgaccattccgccgcccgcgcataagataaatgtggtcacgagattggctccgtccccgttcagcgtatgatacacccccagcgtgatcagcagaagcagggcaaaatacgcgatgccaagaccaaggccccatatgaaccgcttcactttggccatcttgccaatcagaattcctccgatcaaggtcgccatgacatagattgctacgatcgccgccgataccatcttctcgttcagctccatcttatatagcgccatcgtaagcagcaaaagcaatatccccgtaacaatataagaagccagcagcgccttcagcacccacataacctttgagtcttttcgaacctgtctttccatcccatccctccttgtctatcacaagttatgatggaacttccaggtttattccactattgttccatttgctttcctaaaaatcctgcggcgcaggctgccatcttctgttccagttctcccagtttcttcttcgcgtccttggatagcaggatgacgccgcctatcacatctccttcgcagatgatggggcagatgatctcatattcgtattcttcttcctggctgtcggttatggcaacatacttcttatcgccaagggcggccattatctggtttctgtctcccagctgcttctccagcggcctgctgatatatttatcctgcagatcctttttgccagtgcctgcagctgcaatgatctgatccatatcgcagacgcataccaggcagcccatcgtctgagcaaggctctctgcatactgttttgcaaatgcagagagttctccgatgggagaatacttctttagtatgatttccccctctctgtccgtaaatatttccagagggtcgccttccctgattctaagagttcttcttatttcctttggaataaccacccttcccagatcatctatccttcttacgattccagtagctttcatataagttctcctccgtttacaaatctatccattttcttgtatggtggtagtctttgtaaaatcaagttttttatacctgcggccaaaataaatgtcatttatatatcctactttgggctggatatttaaagcacagttctgtataataataagaagtatgatattaggagggataaagatgagcaagattgaagaagtccgaggcgctatggtgaaagccatgaaagccggagacaaggaaaccaaggagactctgtccatgctgctggccgcccttaagaacaaggccattgacaagcgggaagacttgacggaagcagaggaaatccaggtgatcttaaaagaaataaaacagacaaaggaaacactggatatgacccctgcggatcgcaccgagattattgacgagtgcaacaagcgcctgtccgtattggaacagtatgccccgaagatgatggacgagtcagagatcaaggacgtgattgaggctactttaaaagaaatcggcctggatgcgccaaccgctaaagataaaggaaggattatgaaagttctgatgccaaaggtaaaaggtatggccgacggcaaattggttaacgaacttctaatgacctatatgggataaaattatgaaacggaaaagcaagcagaagctgatttttcctgtccaaattccctggatcagatacattcaagaagcttcaggaatttatcgagacggattggtcctatgaatggtagcatcgtgcagcagcttttatactcactggcaaaggctggagcggaggttgcattgcatcccccgctccagccttcgccgtccggtataaaaaagttccagcactatatccaaaaaccttactgcccctcgctatccgtatccacctgatcatccgtcttaacatcattcgcatacggctcctgatcttctaccttcatagtaacgctaagatcattaaaatcaacttttttccaaacactcttgttgaccttgatatccgccttcttaagccacttctcgcaggtcttggtgtagaggtccgtctttctgtcatttacgatagactgcttcttggtatccgtagcctctctgtcaaacaggctggtaacctttccaacatagcatccattctcagcctcgatcatctctgtcacttcgccttctcccagcttatcagccgctgcgatcaggtctgctgacggggtggatgaatccttgtcaaatgttattgtgcttgcttccacgccttgttctgtggcaaatgcgccgaagtcttccgccgtcttggctgcttccgcaaaatcctctgccttgctcttgacctttgccttctcttcatcagacagatctacggatttgccatccgcatccttagtcgtataagggaacagtacatactgcatgctcttctgggctgcctcttcatcggatacttccgtatcagcgtcggcctgaattgcctccgtcatcttctgctggatcgccataagcgtcatcacgcgcttcaccgtctttaacgagccactgattttttctttgtcttccagggcgtttgcctcgtcaaactcttttgcagtactctcaatggcattcttttccttgtcagacagagagacctcatagtctcccatatgctcttccagaagaatcatagtctccagctgctttagcacggagtcttttacggattcttcgtaagtctggccttccatcgcttcggaattccacatgtcttctcccagatatcctgcgtaataggtctcatactgggcctgtgtatatcttgcatagaaattagcaatgtcggctgttatctctttgtcgcctaccacggcaaccacatcgtcgtctttaaacgatccgcagccggtaagggaagtcgctgcaagcatccctgccattgcgagtatcaatatcttctttttcatgttcttgtataccctccttagtaccgttaacttctctattatatcctttttttactggtcaatcaatcctttaattccaattagcacatttttcacaaccgccagcacatccgtatttttctcttttttattgcgactcttcttctcatataagaagcaaggattctctgcatctgccttaaaggccagatcccctttaaactgctccaggagtccgggaatcttctggggctggactttggccttttcatacatggagaaggtgaatctttctcccttctgctctactgccgtcacgtaggcgctgtgagcaatcgctttcaggcttgcgacagccaggagagtctccacctttttggggatatctccgaaacggtcaatcagctcttccagcatgtcttccatctcttcttcattttcaatggccgccacccgcttatagatatccagtttctgatactcgttgggaatataggaatccgggatatatgcatccacattcagatccatcgtagtgttgaaagtctcttcttccatctcgccttttaaatgcttcaccgcctcattaagcattttgcagtataggtcgtatcccacggcttccatatggccatgctgctcagcgcctagaagattgccggcccccctgatttccagatcacgcatggcaatcttgaatcctgatcccaagtctgtgaactctcggagcgcagccagccttttttccgcaacttcccggagcagtttatccctccgataaagtagaaaggcataagccattcggttagaacgccctactcttccccgcagctgatagagctgggacaggcccagatgatcggcatcatggataatcatcgtatttacattggagatgtccagcccggtctcaataatcgttgtggataccagcacgtctatctctccgttgataaagtcgtacattatcctctccagctggtgctccttcatctggccgtgggcgtattccaccgtgacatccggaaccagtttctggatatggcctgttatctctgctatatcctccactcggttatagacataatatacctgcccctgccttccggattctctttcgatcgcttctcttaccatctcgtcattatactccatgacgtaggtctggatcggcatcctatcgttgggagcctcttccagcacgctcatatcccggattccgatcaggctcatatgaagcgtccgcggaatcggcgttgccgtcagagttaatacatccacattttccttcagtttcttaatcttttccttatgctggacgccgaaacgctgctcctcatcgatgatcagaagtcccaggtccttgaatttcagatcgtcgcttaagactctgtgggtgccaatcacaatatccaccaagcctttcttggtatcctcgatggtcttcttctgctgagccggagtccggaatctgcacatcagatccacccggaccggaaagtccttcatcctctgggcaaatgtattgtaatgctgctgggccaggatcgtggtgggtaccagatagacgacctgcttatcctcctgcactgccttgaaggccgcccggatggcaatctccgtctttccatatcctacatccccgcagattaggcggtccataatcttatgactcatcatatcctgcttgacggcctcgatggcaagcagctggtcttctgtctcttcaaaggggaacatttcctcaaattccctctgccagactgtatcctctccatatacgtagccttcctgctcctgtcttgcggcgtacagcctgaccagatctttggcaatctcccttactgcccctcggactctggtcttggtcttcgtccattcctgcgtgcccagacggtttaatttgggtttcttggcatccgcgcttgcatatttctgaatcaggtccagctgggtagccgggatatatagattgcctccctgggcataggatatcttcatatagtccttggatatcttatctacctcgatcttctcgatgccctggtatatccccaggccatggttctcatgaaccacataatctccaaccttcagttccgcaaaactctgtatctttcgcccttcataggtcttacgcttcttctttttcttcgtctttccgaagatatccgtctccgagatcaccgtaaacttcagcatcggatactcatagccatatgccacatgcccataagccgtcataatctcgcccggcgccacttcccggtccaactcatcgctataataactgctcagattataatcccttagatcctctgccagacgcttcgccctggtcctggatccggatagaagaaccaccctgtatccattccttttcagacgcttcaaatcctgcgtcagcatgtcaaaactgctgttataaggattgacgcttttcgtctgaaggctgaaggaggcctttgtctccagtcccctgcatttcatatccagggcaaaaaagccgacgctgctataagcgttcatttttcttaagatctcttccgtatgatacagctgcacttccgcgtccgtgacttcgtatccgctttccaccctctttttctgggcttccagaaactcttcttccaccccctgccctttttcgatcaggcggaccggctcatctaagaacaggatcgtctcttccattggaaaataatccaaaaaggaaacccccttctctccttcctgcggaaattccaccgccggacagatcgacacctcttccagattctcgatagatctctgggtctccacatcaaaagtacggatcgaatccacttcatctccccacagttctatccggatcggaagttcttctgtaaggggatagacatccagtatgccgccccttaccgcaaactggccgggagcctcaatctgcacttccctgtcatagccaagcgccaccagcctggactgcatctcttccagatgaaaggtactgtcatttgcaatccgcaccgtcttttcaacaattacatccttgggcagaagggtgtccatgaacgcatcgaaactggtaatcaccgtagccttttcgcctgccgccaccgcctggatcacttccatcctctgacttaccagttccttgctccttaagtctgcctggtaaaagagcaggtctttggccggatacagatgggtattcggatccaggaatcgatactcttcatagacttgttttgccttggattcacttgaacaagcgatgactctgtaattacagccatcgctcaacgcatacatcatatgggttttctgggaattcacgcatccgcagactcgtatcatccccgcgccttttcttatgtccctgctaatctcttcaaattctgctaattcattcagtggcctgattaaggcttgcatatcttaggcctccttaggctttacttttctgttaaacttattcatggcctcttccatctctcctctgaggatcatctccaccgcttccacagccttctggcatccttcctccatgatggcgcgctcttctttcgagaaacgactgaggacatagtctgccagatcatatttcttcggcttttctcccacaccgaccttgattcttggaaatacttccgtcccaagatggctgataatattcttcattccattatggccgccggcgcttccttttttacggattctaagttgtccgacatccagactgatatcatcgtagacaaccaaaaactcgctttcttcatcaaccttataataatccaccaggccgcccaggctctcgccgctaagattcatgtaggtctgcggcttagccagaattactttcttcccctctatgattccttttccgatcagggctctattcttcctgccgtctacagatatattatatttgccggcaagcgtatctatgacatcgaagccggcattatgccgcgtgccttcgtattgtaatgtaggatttccaagtcccgctataataaacattcttctcacctcagtttctattcctttccattctacaagaagccgtcctatttgtcacgtaaaagaaatgaataatttgctgtcttttttcatacattatagaaagtaataaatatcatacacaatacaggagggtctcaatgagttccaaaacaaaaatcgtcgtattgcatatgaaggagattatttacacggcagtcttcgccgcactggcaatcatacttatcctgctgctggtattcatgttccttccaaaaaataaagagtccaaaaccaacgaggagaaatacatgccaggagtatacacatccaccgtcacgctcaacaacaccgcccttgaggtggaagtgaccgtggatgagacacatatcaattccatccgcttctccaacctggatgagtcggtaactaccatgttccctctgatccagccgactatcgaggacattgctgaacaagtatatgactcccagtctctggataacattcagttgtccgaggatagcccctatacttcccagattattgtaaatgccattgacgaggcattgaaaaaagccgaaactaccaagtagttgcggctttttatatgttcttcataatgattcctatccttctacgatcagatatcttccacccggaagcgggaatacttctgatgcttcctcaatctcttcaagagacatgctgtctacatccagaccttcctcttctagaaactccttcacttcgccgatgttctccacgaccgctgccatgcaatcctccaggaatgcttccgcctcttccagcgtctccgcaaccggctcatcaaacaactgcgcctggtttttcaagaacgtcttcaggcactcctcatcgtactcatacatttctctaacctcccttaatttcttttccttgcttcatacgaactgcatcagttcttccggactgtctatgatagttcccgcgcctgcagccctcaatacttctcttgaccggaacccccaggatacgcccaccatgcgaacccctgcgtttctgcctgtctccacgtccacttcggaatcccccacatacaggcattcttccctgcccgcctgcatctcctccagcagtctatagattccggcaggatctggctttctcgcaattccttccttctggccctgcacgcagtcaaacacatcctcgccaaagatacgctctaccactttcttcgtctgccgatggggcttgttggagagaaccgccagctttattcccttgtctttcatctgcataagcgttccggtgatgccttcatagggtgttacaagatatgtacagttttcatcaaatatacgtccgtatacctccattccttcctcaattcttgaaagttccctatctccagctgcctccagggaacgttccatcagatatctcgcgccgttgcctacaaaactgcggcactcatcggtagtgatctgaggaagtcccatctcttttaacgtctctttcaccgaaaaagccaaggattccagtgtatcggtcaaagttccgtcaagatcaaatatacaagttttcataatacatatatcctccatgcaataatcatagtatgactataggaaaaattcaaggggaatttcgtaatccattccccttaagtgagatattggcgcatcagccgcagcgcattcttttccaggcggcttacctgagcctgggaaatcttgatctcgtcggcaacttccatctgcgtcttgccctcaaagaaccgcagtttgataatataccgttcccgttcccctaagtgctgcatcgccgcttccaaagacaagtcctccacccatttttcttccttattctttgtgtcgctgatctgatccattacatacagggcatcgcctccgtcattatataccggctcctgaaggctcataggaacctgaatggcgtccagggcaaacacgatgtcctctttggatattccgatctcttccgcaatctcctggactgtgggctcttttaggttctgcttgatataattctcttttgcatagatcgccttataagccgtatcacgaagcgaccggctgacacggatggaattattgtcccgcatatagcgcctgatctcgccaatgatcatgggcaccgcataagtagaaaacttcacatccagttccgtattaaaattattgatcgccttgatcaggccgatgcagccgatctggaacaggtcatccggattctcattgcttcctccaaaccgctttatcacgctgagcacaaggcgtagatttcctttgatatattcttccttcgcctctgcatcccctgcttttatgcgcgcaaacaaagcttccttttcctcttctttcaggattggaagctttgccgtattcacaccacatatttcaacttttccctgtgccattgtcagaaccctcctactagatgaatgaataattaatatctagtaaaatgattctccataagttcttttgttattctttacaccgccaaaataaaaaaagttttagaccttgacaaaacattgaaaccccaaaagccacatgctataattataaaaattattgaaatcattctgaaaggcggcccttatgaaaagattcaagatgctactactcttattgcttatcttttttgccgggctgttttttgtttctattgataacaattctcataatatttcctcttacaaagagcaccctgacacctatacagagggctatgtctgccatccggcaacgattacgccttatacgaaagcctcaagcgtatatccgggccctcaaaaaaagacttctttcagaagaggaagttcctttatgctgcgtatgcctgtcctgcacgcatgctgccgaatccctttcctccttggccttcctgcaaaatacaggcgtcttctgcaactgattggcagcctctttgcctctatgattttcatgcttcagatctggatcattcaccaggtagatggaaaaaagcgctctcctttatatgaaaccggcaatttaatataaaggagaatagaatactatggaaataaacgatctcttaatgctgcccggcgggctggccctattcttgtatggcatgcagatgatgagtaccgggcttgagaccgccgcaggcaacaagatgaagacgatccttgagaagctgacctccaatcgcttcaaaggtgttctggcaggcgctgccattacagctgtcatccaatcttcttccgccaccaccgtcatggtcgtaggcttcgtcaattccggcctaatgactttaagccaggccgtatgggtaattatgggagccaatataggaaccacgatcaccggacagctgattgcgctggatatcggggcaatcgcgcctttgatcgcatttataagcgttgcagtcatattgttttccaagaatgataaagtaaagcatatcagttccatttttgcaggcctgggcgtactgttcatcggaatggatatgatgggcgaggcgatggagccgctgcagtcatctcctgcttttctgaacattatgaccaccttccagaatccacttgcgggcatactgatcggcgccgtatttactgctataatccagtcctcctcagcttcggtgggaatcttgcaggctctggcagccacgggggcaatccccttatccggcgctgtctatatcctgttcggacagaatatcggcacttgcattaccgctgtcctggcttccatcggcacaaaggtcaacgcaaagcgtaccacggtgatccatctgctgtttaacatcataggcacgctgatttttacctgcatctgcatggcaacacctttcgtatcctttatggagacgctgactggcaatcctgtagcacagatagccaacgttcacaccacgtttaatattgtaactacgctgatccttctgccttttggcggcctcatggccaaggcggccgtccggctgctcccggacacaaaatccagcgagccccaaagaaggaagctggaatacatcgcgccttttgaaggacattattccatgggacatgccgccgttgtcctctcccagcttagcaatgaagtgtccagaatgtccggcatggcaagagacaatgtagaagccgcttataacgcgcttttaaatgatgatgcgaaagccctggaagccattgaggaacaagagtcctacatagattacctgaatgaggagattgcaaaatatatcgtaagcctgatgtctgtggagatgtccgagaaagattccaagtgtatcaataattattacatgatcatcagcaatatagaaagaatcggagaccatgcgatgaacatcgctgaatatctgaagtccttgaaaaaatggtccgttcgcttctccgacaacgccatctcggagatacgcaagatgaagcaggtgagtcttaagctcctggaatgtctggaacgcgcggatggagaaaacagccagtttcttctggagcaggccgcgaaatatgaaaatctcatcgatgatatgcagaagaaatacctgaaacggcagataaaaaggattcgcaaaggaaattgcaaggccgaggctggcatccttttttccgaactgctcacggactttgagcgaattggtgactatgcccttaatctggctgaattatatgctgatatgtaaaaaagacaaataatggatttgcagcaggctgctgcaaatccattatgattcccgatggcccgcatgggaggcgcatcagtcgcgatcccatttatccgcaagattatggatctgattctcaaactttgcaaggtccttgtttgcaaggccttcattcttatataccacgtcaagcagccgcttcgccgcagcgaccactcgcccaaacgccgccgtcgccttggctcttgccggcttctccgccgccttctttggcatcttcacgccttcgcttaggatctcattggaagcaagatccacgcatccgcctgaatatggcgcaaatgtcggacagcctatcgtgtcttccaccaatttcgcgaagtgatccgtcaccgtatcttcgccgtgcactacgatcaccctgtcaggcttgtgtgtaaaccctttcagccagttcagcagcccgttcatatctgcgtggccgctgattcctttcacatccacgatccgtgcattcaccgtaatattctcgccaaagagcttgacgctctgcgcgccctcgatcagcttgcgtcccagcgtcccaactgcctggtagcctacgaagcatatcgtacactcgcgccgccacagattatgcttcaaatgatggcggatacggccagcctcgcacattccagatgcagaaatgataaccttgggcttatcatcaaaattgatcatcctggactcgtcgcttgtaatcgtggtcttaagtccaggaaagatcagcggatttatccctttttccaccagagccatcgcctcttcatcaaagcaggatttcacattcttattaaatacgttggtggcttcaatcgccagcgggctgtctacatagacttcaaagccctggtactggggcaatagccttttttccttgatctctctgataaaatatagcagttcctgggttctgccaaccgcaaaagatggaatgaccacattgccgcccttatcaaaggtctccttcaatatcttcgtaaattctccgatataatccggcacctcatcgccatgggtcctatctccgtaagtggattcgatcaccacgtagtctgcctcggctaccttctgcggatctctgataatgggctggttggtatttcctacgtctcctgaaaataccaccttttttgaaatcccatcttccgtaatccacacttcgatactggcggatccaagcagatgccccatatcattgaaccggacttctatgccttcgcataatgtgatcttttgcccgtaatcgcagggcgccagcaatttgatggctgcatccgcatcttccatagtatagagcggctcatatgtctcctcgccgcttctcttagccttgcgattcctccattctgattctgattcctggatgtgcgcgctgtctcgcagcatgatgttgcacaaatctgaagtagcgaaggtcgtcacaacatcgcctttgaatccctgcctgcaaagaagcggaatctttccggaatgatcgatatgcgcatgggtcagaagaatatagtcaatctcctttgccgtcacaggaatttcctgattctcatacagatcaggcccctgctccataccacagtcgatcaagatatttttcccgcatgcttccaacagatgacagcttccagttacttcgtgggctgcaccaatacagctaagcctcatatacccaacccctttttttcttctattgtatcatcttttcagggcctgcgctatgaatactttaccatctcccgttttaaccgctgcatgatctttttctcaagccttgagatgtaagattgggagatccccagcatatctgctacttctttctgggtcttctcctcgccatccggcgttcccagcccaaacctcatcttgataatggttcgctctcgcccggacaggcggctgatggctttgaccagaagtttccgttccacttcgttctccaaatctttataaatggtatcctcgtccgtccccagaatatccgagagcagcagctcattcccgtcccagtccacattcagcggctcatcgatggatacctccatctttgtcttgttattcctgcgaagatacatcaggatttcattctctatgcacctggatgcataggttgccaacttgatattcttctccggattaaacgtattaattgcttttatcaatccaatcgtgcctatagaaattaaatcctctacaccgactcctgtattgtcgaatttcttcgcgatatacaccacaagtctcaggttatgctcgatcagcgtcttctttgcttcctcttcgtcctccgatcccaagtcattgatagccgccgtctcttcctcggtattaaggggcgcaggcagtatatcggagccgcctatgtaatggacatccttcttgtccgggaaaagcagcgctttgaagtcgggtattacctttagtttaaattgatgcggtactgctacttttattatcatcatctattcctcctaccaaaatctcaggatttataatcatcttatatttatcagcggtcatctcattctcgcaaatagccgccatcggttctgcaatccattgctttttgtcattgcgtatgcacatcttatccaacgtcacaagaggcatgaccccatccttcttgccgatggaatgatagggaatgtagcgtaatttgactgcctcgctccccgcgagaagttctcttgccacatcctgatctagaatgcataccggctttcctgtcagttcatccctcaggctgtttcccgtatcaatcaacgcctgtacctgacatttccttccattcatataaaggtctgcctggcatctgtactggttctgcctggaaagataggaaatcaggctccagatgccggacaccacatagtaactggctactgccagcacaaagaacaggcttccgatccgcatatactgtccgaggaattgaaacaccccacctgtcaggaacccgctgatatacagcagtatccaggccttcagcatatctgatccccacttgactaaaagccctgccctgatcattaaaacattcaccatgccatggaacagtacgaatttgacaaacgtatagggaactggaagaattataaccagacaagtcagtgctgatcccaggagcgctcctaatgcaatgcgtccatgcctggctggacatttcagcatcttccttacagccacaagaaggatataatccatcgtaaagttcaccgtgaaaaacacgtctatgtacaattcataatacacgttccaccttctttctctttgggtatactaaatcgatttggtacgtgggcaagattcattatacgagttgctccaaaaagattttgtcagatgatggagtccatttttattttcgttcgacagcaccttcaagacacaagatatagattcccataagatgattttttcggatttgtcttatgctggcatacaacactttgtatccctcattggcataaaagaaagaattttgtggaataaaaaaagaatttcttgacaaaacttgtcgtaataataggatatatagaaaaatagaacgaaaaatagaaaaaaagccagatgcatgaaaatcatgcatctggcttcctatcattattatttcttaaagaaatccggtatcttgatagactgttccttcaccttgctggttggggttcttggagtctctaaggatggcgtagtccctcctaccgaacgctttgccgcagtggtagtgccgccgcctttcgtgggcgccatgccaaagtcaatccttggagatgcctgggaagtctgcgccggctgtaccggcctttcatatccctgggcatgcgttgccgctgtatgaggcacggaagaaactcttgggttttcaagtcttgctttcagtttagaagcgcttcctcccacattatgaaggcctgtggcaataaccgtaatggtcgcctcatccgccctggaatcatcatacatagcaccgaagatgatgttagcatcctctcctgccagttcctgtacgtactctgccgcatccgatgcatccataagggtgatatcgccggatacgttgatgataacatgagaagcaccggcaatggttgtctcaagaagcggactggcaacagcctgcttaactgcctcaagagccttatcatcgccacgtccctgtccgataccgatatgcgcgattcctttgtccgtcataaccgtctggacatcggcaaagtcaaggttgataagagaaggtacattgataaggtctgtaataccctggataccttgctgcaatacttcatccgccttcttaagggcctccggcatggtggtgcgtctgtctaccacttccagaagtttatcattcgggataacaatcagagtatccacgctttcttttaatttttcaattcccgcaagggcattattcatacgtgtctttgactcgaagcggaaaggctttgtcacaacgcctaccgtcagcgctccctgttctttcgcaatccgcgcaaccacaggcgtcgctccggtaccagtgccgccgcccatgccgcaggttacgaataccatatccgcgccttttaatgcggctgatatctcctctgcgctttcttctgctgccttttctccaatctcgggccttgcgcctgctcccagccccttggtgatcttgtccccaatctgcataagcgtcggagccttacataactgcaatgcctgtttatctgtattaatggctataaattcaacaccggcaatctgctcgtcgatcattcggttgacggcgttattaccgccccctccgactccaacaacaattatttttgccgctgcttctgattcgttcgttttaatttctagcaagggtttctcctcctttgttatccttattatatattatacatcccgtatataaagcaaatgaaaaaagttcagtctgccatatatagtatataatatagacttttgtataaaatatcaatagaattacagtatttttcttatttttcttccggaaattctccaatatcaaaggtaattgtctcagttgtctcggaataattttctaaatgaagagttccttcctgatctcccagtttttccatgattggtgcaatctgcgcaatctgctcggaagatacgtttttccctaggcttacgcatacttttccgatatgcagatagatcttgtcatccttacatacaatacgatccgtagacagatgatacttcacgacttccttagacgtctccagtatttcttcaaatatcctggtatcatcgctccttaactgcttgtacagcttaatatcctttacctcgatcccctcgatgcatggcaggccctcgatcagggaagacgactctgaaaccaccaaccccgccttgtcaaaatatgcataatcctctccattgcgcacatatcctacgatgggcttctccttcactgtaaccttgagtacccaaggagccttaagcccaacttccatgctttccaggcatgggagctgctctccgtatcccagcgcgtattttccaagaatatacagcgtattaatggaatacttatcactttgcaccgtatcggcgatctcctgatccgtgcagtattcattgccgctgatctctatcttctgtacataaaaaagaatcagaacgcccagcgcgataatcgcgattcccagcagaaggaccaccagcgcgtacaggcggtgggacttcttctttctttttcccggcttttcctctttctgacgcttttcttttcccatggtatatactccctttttattcttttcatcttatctgttctattttaccagagaagacacgcttagtacaagccccatttccaaaagcaggaacaccagcgacgttcccccgtagctgacgaagggaagcgtaattcccgtattgggtatggtattggttaccactgctatattaaggatgacctggatcatcatatgcgccatggctcccgtcgcgatcagggctccgaacaaatccctggagtgggtggcgatcacgaaaaatctccagataaggatcaggaacaggattaagacaaatcctgccccgaacagtcccagttcttcgcagataatcgagaagatcatatcattctgagcctccgggacgaaacccagtttctggacgctctggccaatcccacgtccaaacaggcctccggagccaatggcatagagtccctgcaaggtctggtatcctttctcatatgcctccggattcctccagatggcaaggcgctccagacggtaactctcaagcgccaggaagatcgtcatgaatccaatgcccaaaagccccatgaacacaaactgcccgtacttagggctggccacgaataccaggatgactccgatgcccagaatgatgatggccgtgctcaagttgctggctcctacaaggccgacgatgggcaggatcatagccataaccttgatcatcgtacgcatctttcccatattctttatatccttcgttatcacatgggccagaaacaatatcaccgcaaccttggcaaattcggaaggctgaaaagaaaaaggccccaaagacaaccatcttttggacccattatactcatcgcctacaaataagactgcaaccgacaaaaggattgccgtaaagtatcccagcacagccacatgcctccaccagtgatagtccatattggccaccacaaacatcccggcaatacccagaagcatggcaaaagcctgcttcttcagatagtaaaatgaatcatggaactttacttctccgttgtatgcactcgtactatacaggatcaccaagcccatgatgataagaagaagtaacgcagcaagaagcgtataatcatgcttcgaatttctttttttagattgtgccaatctatgccactccttataaggaatttacaatctctttgaacttctctccgcgtacttcataacttgggaacatatcccagcttgcgcatgccggcgatagcagtactgcatcccctggcatggcgatcttcgctgccgtaagcaccgcctcttcaaatgtatctgcaaacaggtaatccttgaatccgcaggcatttgcatcttttgcgatcttctctttcgttgccccaagaagcaccagttttttcacttttccgtcaaaactttcaatccaatccgtgtaggcggaatccttgtcgtatcctcctccgatcagcaccgtcggcctgttcatggcctggatgcccttgatcgcggcatctgggttggtacccttggaatcattgtaataggcgaccccgttcttctccgtcacatattcgatcctatgctctactcccttgaactccttgatgcttttgcggatggtctccataggcacgccataaacataagccatggcaacggctgccattacgttctcgtaattatgggttccaagaagctgcagttcatctacgcagcatacgctgacttcttcgccgtccctatagatgatattgccatcctcaagatagattcccttttctagtttacgctggctgctgaaatatagaacctgtgctttgactttctttccaaattctcttgtcaggccgtcttcataattcaggatgcaatagtcctgcgggccctgatttctggcaatattctttttcgcgttcacataggcttccatggtatggtgtcgattgagatgatccggcgtaaagttaagaatcgcgctcaccttcgggcgaaagtccacgatgctttccaactggaaactgctcatctcggctaccgtaatcgtattttcattcatctgtcctgccacggccgtatagggattgcctatattgccgacaatgtatacatcatcctggtaattcttcatgatctcgcccagcagggaggtcgtcgtggtcttcccattggtgccggtgatcgccagaacatcgcctttgccaaacgcataggcaagttctacctcgccgatcacctggatgccccgctttctcatctcttccaccacgggaaggtctgtaggaacgccgggacttaagattaccatatccaggccatccagcagatcttccggaaaacttcccagtaccaccgatgtcttcgggcctcccccaaggctgcttagcagtcctgctttatccaatttctcattgccgtcatacagcaccacctgcgcgccatgctgcgcaagcagctttgctgctcctattccactgattccagatccaaacaccaggaattttctctcttttacttccatagatatcctcctacatagccattaatgcaatcaggcacaggattgccgtaataatagaaaatactgccacaacctttgtctcagaccatccgcacagttcaaaatgatgatgtatcggcgccatcttaaagaacctcttgccgccggtctttttaaaatatgtcacctggattatgacagataccacttccaccagatacaccaggcctacaataatgataaatatgggcatctgcagcatatatgccgtggaagccacgaatcctcccaatgccagggatcccgtatctcccatgaacacgctggccggatatacattgaacagcaggaagccaagaagcgctcctaccaccgcgcacgtaatcggcgagatgccactcttggttccgattgcaaccaccgtgaagaatgtggctaccagcacggtaacgctggaagcaaggccatccaggccgtctgtaaagtttacgccgtttacggttccgattaccgcaatgaacatgaccggaactgcaagccagcctatattcagatattttccgccggaaaacggaagcagcatcgcaagggatacatccgtaaatttcaggatatagaatgcaaagatggcggtaacaacaatctgcagggccatcttctgcttcgggtataatccgtccgagcgcctcatcaccactttcaggtaatcatccaaaaagccaatcaagccaaatcccaaggttacaaataatataggaaggattttgggataatccttgatgtagaacacagaagtaatcacaatactcagaagtataatgacgcctcccatggtaggcgtccctgtcttcttaagatgggactttacgccgtcttcccgctctgtctggcccatcttaagccttcttaatatcggtatgatcaccggccccataattacgcacaatgcaaaggatatcaacactggtataaatactttataatccataatccacctcttcgtctcttttgttaatcaggcaatttcttaaccttacctagtatacttcatttcctattgtttttcaatgccaagatagggcaatatattctcaaatatgttccctatgacaggcgctgcgatcgtcccgccataatagactccctgcggattatatatgacgcacatccccagcacctgcgggttatccgcaggtgcaaacccaatgaacgaagagatatatttattggcgcttcgtggcagcgtctgggaggtagccgtcttcccgcctatccggaagccttccaccttggcgtttttcccggatccttcggataccacgctctccagaagcatgcgcatggtagcggaagtctcttctgatacgatattctttttttctttgtagcggaactcttctatttcttttcctttcgaatccaggacccttaccccgaagtggggcgtcactcttcttcccccgttgattaaggaactgaccgtagttgccatctgcatcggggtaatctggaaagactggccaaaactcatcgtcgccagttccacaagccctatattctccttcttatgcatgatcgttcctgcctcgcccggaaggtctacgcctgtcatatccatcagcccgaactgcccgaaatagtcgtagaaccggtccactcccagcctcagcccgatatcaatgaatacaggattgcaagaattctgaatgccctggacaaaagtctctgatccatgccctcctactttatggcagcggatcttgcgatcctccaccacccggtatccgggacagctgaatgtatcatccagatgaaccacgccttcctccaggcaggcggatgcagtgatgatcttaaaggtggagcctggctcataggtatcattgatacatccattcctccacatctggttcaaggcttcctgcttcttttcatccgtcatagaatcgccgctttctcccgaattcaaggtgaagggctcgttcaggttgaactcaggcacatttaccatggcaagtatctccccgttctgcggattcataagcaggatagccaccttgtctgcctgcttttcttccattaccttttccgccatctgctgggcatacatctggatattataatccaggcttacctgaagcgtatttcccgctaccggctccaccctgtcttccgccaccccgtcaagttccacgcctctggcatccgttgtcgtcaatatcgttccattaattccctttaaatattcctcatactttacctcgagtccgataattccctggttatctccgccggtaaatccaaggaccttggaggccagttcgttataaggatagtatcgtttgaaatcttcatccaccttcacgccttccaattccaggtttcgaatcttatccccggtagccttatccacattcgccttgatccgctccatagaagacaccttctccaccctggcccgcaccgtcgtctcgtccatctcaagggcagcggaaagttcccggattacggtttccggatcttttacctggctatggatcacagagatggtacagaccgtcttattagtagccaggacggtgcctcccgcatccacaatctctcctctggccgccttgatctcccgctccctctcatgaagggcttccgccttcttctggtagtactgggcatcaaataccatcagatagaccagcctccccaccagcgccagaatgattgcagccgcgcagatgaatactacgaatatctttttcttgttatacgttttattcttcatattgaaaaaacctcacaaaagccgtttctataatttattatggcttttgtaaggttattcagctaatttccctcagcgtccgctgatttttctattcccagataagggaagatctccgtcatgatcttggaggacagttccgtcgcataggaactagaggcctgtcccggcacattcggctcatctacgactacatataccactacctccggattttcctggggcgcatatccgatgaaagataccagatactttccgttgcccctgggcagtttctccgctgttcccgtcttaccgcccacatcatagccttctacagctgccagggagccagtaccttcctgaacaacgcccagcatataatctttcaagatatcgctggtctccttggataccgtctttttcatcaatacaggatccctgttctccgtcacattgccgttgtcatcctgtatctgttttaccacatggggcttataatagtcccctccattgatcagtgagctgaaagcagccaccatctgggtcatcgtcacattaaagttctggccaaatgcgttggtagcaaggctggccgcatccatattctcaggcgtatacagaagtccttcggtagatccttctcccggaaggtcaatcccggtatattccccaaatccaaatagtttctgataacggcagaattcttccgtgccaatgctctggccgatttccatcagcgcgacgttgcaggaattttcaagagactgcttcaaagtctgcgggccgtgtccatccctgttgctgcagtggatgtcgtggtcgcctacatgaagcacgccgccgcatacataattctcgtccccggtcagaatcccggtttccagtcccgcggcaatggtaaatggcttaaatgtggagcctggctcgtaggtatcgctgatgcagaaattattccacagttcattcagcttttcaatcttttcatcatccggcattgcggcgagttcttcttccgagtaatatttcgacatatcccttggattgttcaagtcataattcggataggaggcttctgcaaggatctctccattttgaggattcattacgataaccgccgtattcttgcttccctcgcccggagtcgtctcattcttgtgctcatcattaaattccagaatgtgcttttccacgatattctgcacctggaggtcaatggtagagaccactgtgctgccgttatcagcctccttgaccgtacgctcgaaggaggaactatcatccagatacccatactctcttccatccgttccattgaggatggaattataggatgcctcgattccattgctgcctacgtttccatcgacggtaaagccgataacatcgctggcaagcgtgttgtaaggatacgtcctgatatagtcttcctccagccagattcccttcacatccggatatttcttgtcatccttgtctattttctcaaattcctttgccttggcgtaatccacgcctttctgcaatatattatatctgctggacgggctcttatccatcagttcccgcaccttgtcttcttcgattccaaaacagtccttcagcacttcaatcgtcggctcgatataatccttatcgctcatcataaccttcacatccaggatcacgttatagaccctttcgctggttgccatcttcgtaccgttgcggtccacgatatctccccttttaaaaggaatggtcctgctgtcatactgctgctgatccagaaccaccttcgtgtacttgtctccgctggctgcgttgatataggttattctgccaactaagaaaacaaaagctagtacaattgccacgaagagcattactagctttttttgcattcgtttggaaaatcttttcttaaagaaagtttttgtctgttttgccatatttccacctatttagaattcttgtctgactgggcaagcaccccgtcttccggaatgctctcatactgcttcacataatctgtggcagggttgtcatattctacaacctgctgtggcgaagcatataccattcccagatccgtctgcgctttatcgcgtatctcgtccagattgacggaatccataatcgcattatacttagtattattctcttctttcatatccgccagttcttcctgcatcgcagtaatgttcttggaacggctggtgatcctggactgaagctgcacataattgacgcacacgatcaatgccatcaatgctgctattgtcaggaaaaccacgtacgcggaactcatatggagggcttgtctcctatttctgcgcacctggcggcttgtccttttcactggtctttcgggcgacttttcatggcgtctcggctcatatgccggctttgttaccacattgccatatacatacatctgtgcggatgcgctgtttctttcactgcttcttcttgcgtactgctgtctgcctgctgaataattctgtcttgccgccatgtttgtcacccctttctgtcttctatctatcggcacttatcttctctcaaagatacgaagcttcgcgctctttgagcggctgtttgcctccatctcatacttgcttggaaggatgggctttctagtaacaatactcccctttgatacgttcccgcatacacatacaggaaaatccggcggacaggtgcaaggattctcattcttcttgaatgcgctctttacaatcctgtcttccagcgagtggaacgtgataatgcatagccttccacccggattcaatagttcgatcatgtcgtccagtgtatctcttagaacctccagttcccggttcaattcaatacggatagcctggaacgtccgctttgccggatgcccagacttcttctggtacttcattggtatggcccctctgataatctctgtcagctggcctgtcgtctcgatgggacctttaccgcgctgggctacgatatgtttggcaatgttcttggcaaacttatcctccccgtaatctctgatcacacggtaaagatccatctcgctgtagtcattgacgatgtccctggctgtcattttctgacgtgtatccatccgcatgtccagaggcgcatcttctcgataggaaaatccacgttctgccgtatccaattgataagatgatacgcccagatccaggatgattccgtcgaccttgtcaattcccagttcatggagccgcgacttcatatcacaatagttgctcctgactatggtgactttctccccgaagtcttttaaacgggcgtctgcagcctcgatggccgccgcgtcctggtctattcctataatactcccctttgttccgaggcgtgtgcatacttcataggcatgtccgcctccaccaagcgtcccatctacatagatgccatccggcttgatgtttaatccattgattgtctcatccagtaatactgacttgtgctcgaattccatatcttctccctctagatactgaatccgctggcttccatatcagatgcaatatcttcaatgttaagttccacttcagcattcttttcatcccatcttgctttgtcccaaatctcggcacgcttccccatgccgatgaatactacttctttatccagtttggcaaaatctctcaaaacggaagggacaagcgttcttccctgcttatccaagtctccgtcagttgcgcttcctataaagaagtatgcaagcgcgcgggcttttttatctgtggtcgtgggtaaggcgttaagtttctcttcaaaggtgttccattcgtcttccgggtatacatagaggcaattttccattccttttgttatgacgaaatgctcccctagatcgtcacgaaacttggccggaatgatcaatctgccttttgcatcaatattatgactgtactctcctttcaacataagaactcaccttctcccagtggtcttccacttatctaccactttgctccacttctcaccactttctaccacttgaaaccattgtaaactacttttttattgttttcaagccctttttataattttaggcaaaaaaataacgggcagaatttcttctgcccgcaatcgcgtctgtcttgctgctattcacctgcttcagccgcatcggcaaggttctgcgtcagatccttgacagcagtatagtcaatctgcaccttatccttcggcttgttggattcatacgttccataggcggaatacccgatccacccgatcaatacaagtcccacgactcccaccacgcatttgcgcaggatgttctggaacttctcttttttcaaattcttcttacggtttgctttttccttcttatatctatctactttttcctgactcataatttccggctccttctttccaggctagaaatattctatcacaatcctgcggattatacaaccacaattatgcccccgtcggacgcatacatgctgctgattcccgccgtatcaaggatcaccacatccctgaactgcgcctttgccatcagcatctccttcacatattccgctctgtccgggcagttgcaatgggaaatcgccaatatcttatccttggaattcttcagattttccaccacgtgatccgccatctttatcagcgctttcttgactcctctggcctgtcccagctgcttgatcactccatcctcagtagcgcccataaccggcttgatattaagcgccgtggccacgatcgccttaaggcctgtaagccgtccgttctttcttagcgtctccagagtctccagtacaaaatacgtgtcctgctgggcgatatatgcttccacctcgtctacgattttctgaaactccatgcctttttcctcgcactcggcaatcttcatggctatcagggtctctcccactgatgcggaccgtgaattaaacacatagatatctttctctccatgctcttcatgatacagattcttccccagcatggcgctgttgtaagaaccgcttaattctgccgacagggttaccgcatatacatgatccgcatcacagcagtatccttgcatatatctttccggagatgggcaggatgacttgggacattccggcgaggatgccaccagtttcagaaagcctgcctggtcaaatgtctcgtcatcgataatatggtgtcctgctacatctatctctaatgatgccgtctcaaaatatccggacgccttcatatcttctgtcaattctccacaactgtcaacaatgatcttataactcatatcgttcctcccggcatgcagacatctatatgttttagcatgtcatctatttctattatatgtagttttgaatactacattattcatcatagcatatttatgccagaaagaaaagtattttattcgctgattttgattctctgcgatacccccagcgcaatccccatctccgccatcaaaaacagaatcgaggttcctccgtaactgataaacggaagcgtgattcccgtcgtaggaatcagattgatgacaaccgccacattcaatactacctgaagggcgatatgggcaaagattcctgttacgatcaaggatccataaagatccggcgcattctgggcaataaacagaagtcgaaacagcagcattccgaatagcaccaggacgatgatcgctccgaacacgcccagttcctcacatataatagaaagaatcatatcattctgcacttcgggaatgatcatcttctgcgcgctgttgcccagtcccttgccgaagaatcctccggaaccaatggcatagagggcctgcatgatctggtatccgccctctgaggcatgctcttccggattcagccataccagaattcttcgcaggcggaagttctcgctggttgcaagcgccattcccagtatcttcactcccaccagaatcactgccagtccggcaataacgatggcgatgaagggcttcgtcttcggatgtacgacgaataccataatgcatgagattcccataacgataatggcagtactcaggttatctgtaagaaaaaggacgcaggccgcagagaagccgccccacaggaggacctgtccaatgcctcttagcgtctttatctccttgcccatcttgcagatcagcaccggtatgaacagaatcactgcaatcttcgcaatctccgatggctgcagctgctgatcaaaaggaagcttgatccagcgcttggcgccatttacctcttttccgagaggcgtctttaccaaaagcatcatgaatacggagaagaaataaatcggctttgcccatttaatataggcatgatagtctatcttcataactatatacatgccgataaatccaacgatgcagaacagaatctgccgcttaaaataatgcatgctgtccccataatttaccaaagcgctgtaggcgcttgtgctatacagcatcaccaggccgaaacaggacaggaatatcagcacggccagcaagctatagtcaaaataactgacggcatttgttcgcttttttcttgtttctttttttctagccatattttacactccaatcgtatctattatactcagatacagaggtaaaaacaaccaggaatccctatattctctcgtggaatgtccgggagatcacttctttttgctgttcttttgtcagcttgttaaagttgaccgcatatccggacacccggatcgtaaggttcggatactttgccggattgttgtaggcatctaccagcgtgtcgcggtttaagacatttacattcaggtgatgtgccatctgtccaaagtatccatccagaaccgcagtcagattcgccagcctctcttcctccgtcttgcccatggcctgaggcacgatggagaaggtgttggagatcccatccttgcagtattggtaggaaatcttggccacagagttcagggatgcaagcgcgccgtttatgtctcttccgtgcattggatttgccccgggggcaaacggctctcctgcttttctcccgtcaggggtggctcccgtcttcttcccgtacaccacgttcgacgtgatggtcaggatcgatagcgtcggctctgcatctctgtacagtttctgcttcttaagctcttcatagaacagtcttacctgctcgctggcaatctggtctgcccggtcgtcatcattgccaaaggccggatactccccgataatctcataatccgtaatcagccccgtctcctcatcgcggatacatctgacttttgcatgcttgatggctgacaatgagtctgcaagaacgctcattcccgcaatgccaaatgccatataccgatgcacgtccgtatcatgaagcgccatctgggtcttctcatatgcatacttgtcatgcatataatgaatcacattcatcgtattggcatacatattcgcaagccaaggccggtagatatcaagcagttccataaccttgtcatattccagatactcgccctggtatggctcatgtttcggtcccacctgcatattatgcttctcgtcttttcctccgttgagcgccatcagaagcatcttggccaggttcgcccttgcgccaaagaactgcatctcttttccgattctcatagccgaaacgcagcaggcgattccatagtcatccccgaactgcggacgcatcaggtcatcattctcatactggatggcatccgtatcgcaggatacttttgcacagaagcgcttgaaattctccggcagattcttagaccacagtacggtcaggtttggttctgctgatggcttcaggttatagagcgtatgcagcatgcgatagctattcttggtcaccagcgtacgtccgtcctcgcccatgcctcctatggattccgtaatccacatgggatctccagcaaatagatcattgtattccggcgttctcaaatgcctggccatgcgaagcttcatcacgaagtcatccacgatctcctgaacctgtgtctcatctaagatgcctctttcaagatccctttcaaaataaatatccaggaaggtagaggttctgcccaggctcatcgctgcgccattctgttccttgatcgctcccagatacgcaaagtagagccattgaaccgcttcttttgcattctgggccggctggctgatgtcatagccgtacatggcggccatttcctttaattttccaaggaaattaatctgctgatacagttcctccagctggcggatgtgatccacatccatcgtctccatactgattctgtctttatctttctgcttttcttcaatcaggcggtccacgccgtaaagggccactcttctataatctccgatgatgcgtcctcttccgtatgcatccggaaggcctgtgatcagcccgcagtgccttgccgccttggtggctttgttatagacgcggaacacaccgtcattgtgcgtggtcctgtattgaaactcgtcttctaccttctgggacaattcgtagccataagccttgcaggcttctcttgtcatccgaagtccgccaaaaggattgacgccgcgctttagcggcctgtccgtctgcagccctacgatgatctccttgtctttgtcgagatagccgggcttatagttcaaaagagaggtaaccgtatgggtgtcaatatccagcactccgccaaactctctttccagcaccagcagattctcgaatttgtgcagcagttcctccgtgcgtccggtagccggcttaaggaactcttcgtttccttcataaggcgcatagttcctctggataaagtcgcgtacattgatctcttcctgccattttcctgtctgaaatccttcccattgtgtaaacatctgatacttcctcctatattctgaatatgacaccaattcgctgctgctctccttttatcctggtaatgatggacaaaaaagagcagcatcaaaaaacgatgctgcccagacggtcggcttgattacagatcttcattcccttgtggtactccacattatccgtcagtaatgaagacctttgtctacttgtatgaggagtataacatcagaaagcctcaagtgtcaattcgtcatttttactaaattttatgttacagcatctctctctggcaagctgtgcgggctgcaattcgtccaaagcacagcgcatgcccaaggctgtagccgcatgcaggaacaccgtggccaaaattgcctgtattcgccacttctcctgatgcaaacagtccggggatgattcttccctcctgatccaggactcttcctgtaatgtcaatctgaaggccgccaaatgttatggaggtggctggctttaagaataccgcataataaacagggcctttcaattcgtgcatctggcctgccggcttttcgaagtcttcgtcaaatcctgcgcggcacagttcattatagcgattcactgtattttccagaacctccgggtcaacgcccatctttcctgccagttcctttatgctgccggccttgggggtatccggcagggtaagcgcataattcagcagctggaagggctcgtcgccgcaggtgatataccatgcgccagcgcttcccgtacgcgcaagttcggccccaaccaggctgtggaactgatattcattacagaaccgtttcccgctgcgggtcacgatcagccctgactcttcattgacgcctgccccgcttcgatcatgaagcagcatggtctggagatagggatgctggtaatttcttgccccaatggcttcagcagcccagattccatctccctgactggaatccggacagttataatagtagtccttcatccacggaaacttggattctaccagttccctgttggctgcatatccgcctgtccccagaattactccctggctggcgtggaaagtcacggtgctgccatcttgcgtatctactgctttggctccaacgactcttccatcttctctgatcaattctgacagcgccgtattcagtagcgtagtgccgcccagttcatggaaccggttattcagcggaacgatgaagctgccgccccatcccatggtctgcccttctccgccgatgcaattgtgtatcctccatggcagttgagagccatggggcgcctctaaatcctgtacctcatgccccatcttgatcagccattccaggttctcattggcatgatagcagaaataattgatcttgggatcatccaggaagccgccagctgcatttttcaagaatccgaacagttcctgaggcgagtcatagattccctgctctctctgcatacgggtatctgccgcaatcagcttgcctccggatattgcggaagatcctcctacgattccctgcttttccaccagaacaaccttggccccgcaatctgcggcttccacggccgcggacagtcctgccaggccgctgccgaatacgaccacatctgcgtcaatcgtacggtccggcttcttcgcgggaaccggtaccggaaccttctttaaggcatctgcatcccctccggcctgctctacgcatgaggcgaccgcatgcacgatagcgccgcacactacttccgctcccaccaccataggaactgccagcgactgatgctcgataatcttaggaatgtaatattcaaaaggcgaactctccaagccatatgcctgcccgtagatttccttatgcttaacaatcttaatgtccgtgatccgatcctctgagaatgtaacctccaatatcacctttcctcttactccatagccttttccggtatatgtcccgggtgtataacttgccatattatccgctctcctttcttcatctcttctatgttataaatccaccataatttcctgggattgcaaagtcaacaggcttgcaaagaatcatatactatgccgtttttttgtcgcttccctatgcgctaaatatgtggaaactgtcatctgccgctggctttttggatctctcctcttccgccggaatgctcacatcttatcggtttttccatacactgttattgtaaacgtttatggaaggagcaaagcatatgcctaattatcgctataacacatctgattgtacaagacgcggccaaagcggctgcagccgacagccttcgcctgcggctgcttctgtccgcccgatgtcaagcaagccgacatgctgcgacgacagagcagaatatgatgagcttaatggcctgccaatcgctatggcttacgtgccatggcagcaatggcgggcaatttatgaagtggaaaaaggattccacaggggtacgatattcgaagaattagataagccattcaaagggataggaggttgctgcaaatgacagataacaggccttgccgcaaagatttattagactggatcaacgtagtcagttttgcagtagatgacgtgaaactgttcctggatacgcacccctgcaacaaagaggcaatggaattcttcgacgaattcaaaaagcagcgcgtccaggcgctgaaggaatacgccaaatattatggtcctcttacgcttgataccgcaagcacttgcaccgaacgctggaattggatcaacgagccatggccatggcaggaagggggatgctaatatatgtggaattatgagaaaagactccaacatccggtaagaatcacacagaccaatcccaagatcgctcaggtcatcatcagccagtttggcggtcctgatggggaactggccgcatctatgcgatatctctcccaaagatacacaatgccttacaaagaggtaactggcatcctgaccgatatcggcacggaagaactggcgcacatggaaatggtatgcgccatcgtccatcagctgaccaggaatcttaccccggaagaaatcgagaaatccggctttgataaatattatgtagaccataccctggctttatggccacaggccgcaagcggggcgccatggaccgccacctatctccaatccaaaggcgatcctatcaccgatctgcacgaagacatggcagcggagcagaaagcaagaacaacatacgacaacatcctgcgcctcgtaaaagaccctgaagtctgcgagccgatccgcttcctccgggaacgggaaatcgttcacttccagagattcggcgaatccttaagaatcgtacaggacaatctggacagcaagaatttctatgccatcaacccagagtttgataccaggccctgcggcaaataattgccctgcctctaatgccgcttctttgcggcaaaaaaacgatgccggtactttaaaagtatcggcatcgcattgatttatcttttatttcaacagcataaatacaatcagcgcagccacgatcaaaatagcgatcgcaagaataatgatcggcgcttttgacatcttctcttcctcttcatagtcataaaagtcgtcatccggctcttcctggcgtcttggcttcttctttctgctcttgccatcatcgacagccagcatgtcgtcataagctttgcgcatctcgtcttcacgtttcttccgcacatgctttggcgggatgttggaatatctctgctcttcttcctctttctgctgcatctttttttgcggaaccttgaatttcttcttgcagttatagcataaaagatagttcggatccttttttcctggtcttaactcctgaccgcatattggacatttcatcggaacgtgcccctcctcgtatcgtgatagtattcttacagtccacaggctgctttcatatgcaaatatgatttcatagggacattataatacatccgacataaaatatcaaaaagaatctgaaaatattagcataatggatatttttccgtcaaccctgctaccattctcctggcctttcctatatcttcttcgctctttaacacaaggaagatacattctgcaataacgtccatatcttcctcggtcatgcctctggtggtgactgccggcgtgccaagcctgatgccgctggtcacaaacggagaccttggctcattgggtatggtattcttgttgcatgtgatatgcgcatcatccagacgcttctccagttcttttcctgtcacctcttctttgcttagatctaccagcatcaggtgattgtccgttccgccggatacgatcttcacgcctctttgcatcagccctttgcaaagcgcctgcgcattcttcaagatctgctgctggtattccttgaattctggctccaacgcctccttgaagcataccgctttggcagcaattacatgttccagcgggcctccctgggttcctgggaatattgccttgttaaagttaaacatctcctgcgcctcctggttccaaagcatcattcctccccttggccccctcagcgtcttgtgcgtcgtggttgtcgtcacatgagcataggggatggggcttggatgaagccctgctgccacaaggcctgcaatgtgcgccatatccaccataagataagcccccgcctcatctgcaatttcccggaaacgcttaaaatcaatggtccttgcataagcgctggctcctgctatgatcagcttcggccgttcttttaaagcgatctcccttaccttatcataatctataaagccatcattattgactccataagagacgatctcaaagtatttgccggaaaggttcaccggagagccatgggtcaaatggccgccatgatccagattcattcccagaaccttatctccgggcgtcagcatcgcaaaaaacgctgccagattcgcctgggcgcccgagtgcggctgcacgttggcgtagtcgcatccatacagcttcttcgcacgctctcttgccagatcctctacgatatcaatacactggcagcctccataataccttctgcccggatacccttctgcatacttgttggtcagcgggcttcccatggctgccataactgccttgcttacccagttttcagatgcaatcaattcgatatgagaattctgtctttccatctctttcttgattgcatctgcaatctcgctgtctacctttttaatctcgtcaaaatcatacattccagtacctcctaaggtgtgtttcctagctgggtactattatagcattattgcgcattagttccaagagtaacttctacatcatttttctcatattccccgttcttgccaggagtctggacggtcaatgtaaccttttcgcctgccttgtaatactgcagctgttcttgcagggtactcatgctgttgatctctgtcccgtcaaggcctgtaatgaccgcccctttggagatgcctgccttctgtgctgctccgcctgagatcacttctgatacatatacgcctgtaggcatattgtacatctcggcgctgtcagccgtaacatccacgccctggattccgatatagcctctttcattttctgcaaccttcgtcttggtcttctgattcataaggttcgtaataatatcgcttgcatcagagatcgggattgcataacccatgccttctacggtatcggtagccactttggcggaattgatcccgatgacctctcctttggcattgagaagcgcgccgccgctgttgccgggattgattgccgcatccgtctggatcagcttgccgtcaaagccgtttaattccctgttggttgctgagatgatgccggttgtaacagactgcccgtagcccagggcatttccgatagcgatggccggctctccaacctgaatctgcgtggaatccccgagggtagccaccgcgatcgcatccatggtagaatccttgatatcgctaagtttcacggctactactgccagatcctttgccgcattggttcctttgacattggcctccacgctttcctcatctataaaggaaacagtcagcgtatcatttccttccaccacatggttatttgtaacgatcagaagttccgtatcgttctgtccgataataatgccggagcctacgctctcgcttttctgttcctgcacgcccccgaagaagttctgcacttgctgcacgctcatgtttgtaatcgagactacggaaggcattgtatttttagcaatgtcggctatatccgaggccaccttgctatccgctgacgtggtaagtttggtgctgtccacggtagccgtctgctttgcctttttggcgctgtccgaagtgccgataatctttcccgcaacgatgttgctggtctggaatgccgcgcttgccaccagaccgaacaccagtccgaggcaggctgtcttgacccatttgggagtgcctttcttattcttcttatgaggctcttttaagtccgggcctcccgcattctgattattttcatcctgttccggtgtataataagtatattgattttccatataaaagtctcccttcatctatttatctttgtctatgtatgtagtctactgccaaattgtgtttaaattgtgatgaaagaatgacgaaacgattaaatccaattccctattaattcccgtatctcttcctcgctgcccttcatagagccctgcgccatttccggctttccgccgcctcttccctcaaacgcctcattcagcatcctgcacagaggacggacgtcttcccttccgctccctatgacataacggtagcccagatcatcggttcctgtaaacaccgcacatactaccgcgcctcttcccagcagcaggttcatgagatctcttggagcatttcctgaaagcgacgggtcgaatacagccgtcaccttgccttccacaggaatctgtgccgcctgataagacagcagtttctgctggagggaggccagttttcccttcaggctggcctgttcttccttcatacgctccaccgcgtcagctacttcatattccttggcacacagaagcgcggatatcctcttggcattttcatccttgatctcataatccagaagcgccctgcggccgcagagcatgctgatgcgttctccgcctttatactttgccatgcccaccagcttgatcagcccgatctctccagtccgcttcacatgtggcgcgcagcaggcgcacacatcgtatcctggtaccgtcacgatacggacctggccgtcgatctcaatcttgctgcggtactcgagttcttttaattcctttttggaaggataaatgatctggatatccagattctgaaagaccgcccggttagcctcctgctcgatctcttttaatgcttcccttggaatgggcccgttaaaatccatggtgcagtaatcgctgcccaggtggaagcctacattgtcatagccaaatcgccgatggatcaggccggagaccatgtgctctcccgtatgctgctgcatcctgtcgaatcgctgttcccagtcgatcctgcctgctaccattctgccgatttccagcggcgccgccgtcgtgtggaagatcacatcttcccgctcctttacgtccagcacttctacgtcatccagatatccggtatccgcatactggccgcccccttccgggaaaaaggcggtgcgatccagcaccacctcatacttgtcttttaccggacggcaatccagcacttctgcctcaaattctttcctatggctgtcattataatataatctgtccgtcacgtcctacatcctctccggcgcttcaaatcccagcacgtctatgcatgcttccagcactttttttgccagtatcagcaaggcaatgtaactcttctgcctggcctcgttctcttctgatagaatcttcgtctcgtgatagaaacggttaaatgcattggccacgtcgtagatatatgcgcataccttatgaggcgccagttcttcatatgccgtctccattacctcattatattttgccacttccagcatcagagccttctcgctctcattatgggcgctctcgatcgcaagtccttgaaaggatttcccctgtgcctgatatttattcaggatggacttgattcggacgatggtatacaggatgtaaggccctgtgttgccctcaaaagaagtgaaccggtccacatcgaatacataatctttggatgcctggtttgacaggtctccatacttgattgccgacatgcccacgatctttgccgtctcttttgcctcatcctctgccacggtacggttctcggcaatcttcttatacatctcctcttcaatctccgcaatcaggttctccaggcgcatgacaccgccctccctggtcttgaaaggctttccatccttgccgttcatagtaccaaagcccaggaatcttaaatgcgtctcctctggcacgatccccgtcttcttagacgcgcggaatacctgcagaaaatgcagttcctggcgcttgtccactacatagatgatcttatccggatggtaatccgcttccctttgcaccagggtcgccagatccgtagttccatataaggatgctccgtcggatttctgtatcatgcaaggcggcacttccttggtatccgtctcttcctggacgtctatcaccagcgccccttcatcaatgtgcgcgtatccttcctttttcagacgctcgatcatatccggaatataggcctgggcatctgcctcgcccttccacaggtcgaattctacattcaggttggcatagttcctcttcaaatcagccacagatatattcatgatgtgattccacactgccgtataaccccggtgcccgttttgcagcagataggttgcatttagcgcctcttctctatatgtctcatcctcttttgccttctggcttgccgtggggtagatctcttccagctcgctgatggtaaatggcgcctcgcttggatactctccctggaaattatcatcaaaatacggaagctgcggcttacgctcccgaagttccgttatgatcagtcccatctggtatccccagtcgcccagatggatatctcccagaacctcatgtcccatctttctggcaatcctcttaatactctccccgatgatcgcggaacgcagatggcctacatgaagcggctttgccacattgggcccgccataatctaccagaatcatctttggctcttttgctttttctactcccaactcgtcgtctgcccccatatcattcaggaacccggccacatagtcattcctgagtttcatattaataaagcctggctttaccgcatttacttcctcaatgcatctgctgtcctttaagttctctgccacggcctcggcgatcatgatcggtgccttcttatatgcctttgctcccgccatagcgccgttacattggtattcgcacaagtccgggcggttcgaaagggtcacctttgcataggacctttcatatccagctttttcaaatgcctccgccagttcgtctgcaacgagatctattattttcttcatcttgattcctccttgttgatctgaataatatctttgaaatccagtatactattacagtctcatttagttattttatcacaaggatttccaggcaacaaccatatcttaaaactcttattgcaaaaaatccaggaaagtgctatattattagtaacaattattattattaaataaaggaggatttcttatgaacccaaacgtttttcgcaacctgtcctatggcgtctatgtagtgtcttcccttgatggagaccgcaataccggctgcatcgccaacagcatcatgcagatcacctcatcccctgcgacaatcgccttaagcatgaatcatgataactataccaattcctgcatttcaaggaccggcaagttcgccatatccattctgtcggaaacttccgacccaggcctgatcggatgcttcggcttccgtacaggaagggatgtcaataaattcgatgacatcgattacaccgtcaaagaaggacttcccatcgtcaaagattcctgcggctatatcgtctgcagcctcattgataagatggaggcctcgacccacaccgtctttttaggcgaagttatcgacggggacgtcattggctcagatcctgccatgacctattcctattaccataaggttgtaaaaggcaagagccccaagaacgctcctacctatcttcctcaggaagacgagcctgccagcgattccggcgcaaagtgggtatgcagcatctgcggatacgtctacgatggggatatccccttcgaagaacttccagatacctacgcctgcccgatctgccatcagggaaaagataaattcctaaagaccggcgattcataattacagatgcgcggacgctatgccggccggaagggaatccctcctctttggggttccttcccgtccggcttttcttctgccttttcccattcatatttcatcttacccttgacatttcccctcacatgtattattgtactatatagataatacaacagatctcaaaagcgaggtgaagagaataccatgggatttagataatgaccgcccaatctatcttcagctgatggaaaagatccagctagatatcgtggccggcgtatataagccaggggacaagctgccctctgtcagggatcttgcactggaagccgcagtcaatcccaatacgatgcagaaagccctgtccgagctggagcgcaatggacttgtacattcccagcggaccagcggcaggtttattacggaggatgagaagatgctgaaacacttaaaagagagtctcgccagtgagcacatccgggaattcattgaaaagatgaagcagttaggctttcaggaggaagagactctgcgtttaatacaggaagctataaagggggaacactaatatgaatccaatcttggaatgcgttggtctttctaagaaatataataacaacttttacgccctaaacaatctgaaccttaccttggagcaaggtcagatcgtagggctgcttgggccaaatggaagcggaaagactacgctgatcaagctgatcaatgacgcgctggtgcctacccagggaaaggtgcttatcgatgggaaggagcccggagtcgctaccaagaagattatctcctaccttcccgagcgcacctatctggacgattccatgaaggtcagggatattatccaatactttgctgatttttatgacaattttgtgacagacagggcctatcagatgctgacggatctggagatcaatgccaatgcccgtttaaagaccttatctaagggcacaaaggaaaaggtgcagctgattctggtcatgagcagggatgcaaggctgtacatcctggatgagccaatcggcggcgtagatccagctgcaagagattatatccttcacacgattctcagcaactacaatgagaatgccacaatccttatctccacgcatctgattcatgacatcgagaacatactggatcgggtgctgttcatccgtcagggtcaggtggcgctcaatgcgacggtagatgaaatacgcctggagcagggcaagtctgttgatgggttattccgggaggtgttcagatgttaggaaaactgataaaatacgacatgaaagcactgaaccgctttcttattcttatccacgggtttcttctgtttgccgcgctgctggtacgcttcttcctgaccgggcgcgtgcttgtggagacaccgaaggacggtacattgctgggcttatccttcctgctgttcttcctgattattatgggcgtatcatttggaacctttatagtgatcaccgtccgtttttacaagaacctgttctctgatgagggctaccttacccgcacgcttccggtcaccagcggccagcatctgctgtccaagacgattgccggcagcatctgggggagcctcgatatgattctgctgcttgcgtccttttatattatttctgccactccgttcgtggtggacgcattcaacagtaataaagaccagattctcagggaactgggagtcaccggcaaatacgccggggtgtccttgggcgccatcgtggccggactcttattcttcctgatcatcagcgctattaccagtgtgctcacgatctatgtttccatcatacttgggcagttattctccggccaccgcatcctgggagccgtggtttcttattttgcccttaccacggtcgtatccgtcatatcctttgtcgtcatggtaatctatggatcgttctcggatacattcttgattgcaagcagttctgccccgccagcggactttaacttcatcgcctacatgatcgatatactgaaggtcaccaccgtcttatcgctggtagtcgatgtagtgttttatatcttgtcctactacattatgaaaaagaagatcaacttaatctaatcagccaaaaggccatgagttccgagcgaacctcatggcctttttatgaatctcttattagaatacagcctggattagtaccatatagaggatcgtcccggcgccgatgctcagaagattgttcctcttccagacgtgcagtccggccgtaaccgccaccgctatggcctcaggcagcccatggggcgccttcatcacgggcgtagccttcaggcagtataccaccagcatcccgattaccgccggagtcagtaccttccccaggtactggatcacggccggaatctctttccctttcgggaagatcagaaagggaaccactctggtcgcaaatgtagtcaaggcaaccgtcaggatcacaagaaatgacattgctgcacttattggcatgtcccatccacctgcctttccagcctggtccttgcgataaaaagaaccagaatgattaaaatcatggacggcagcacgaaactgtccatcccgaatatctgcaggcagataaaggatgcggccacgccgatcatctctggaatacagttcttgcgatccatccactgctctacaaatatcaccacgaacaaggctgtcatggcaaaatcaattccttctgaattaaagggaatcagcgttccggcaagcccgccgatggcggagccgatgacccagtaggactggttcatgatggatatggcaaacaggaatttttcttcctccaccccttctgggacgtttgtagtacaaagcagagaataggtctcatccgtaagcccgaatatcatataccagcgtttctttcccatattatgaaatctctccagcagcgatattccgtagaatatgtgtcgcacgttcaccatcagcgtcatgaatatcacctggataagtgaaatcccaggcacaaaaaaattcacagccaggtattgtcctgatccagcgtagaccagcaggctcatcagcattgcccagagaaaggaatatcccttctctgcatacatcacgccaaatgctatcccgataaacagatagccggtcagtaccggaatcgtgtacgggaaagccttcttaaatgccatcttataaccagacatatgctcccatccttcgtctctcattccttcttaaatataaacatcataaaaggggccagtcccctgcatatcccacaagggcctgacccctccaaaacctcgatcagcttccggtagagtcttcataagcattttttaaatctattagcgcttcctgaagaagtgcatccgactgcacagcctcatgatacgccgtctgcgtctctttaatcagagcctgtacatcctcatgctgtgcgatttcattgatataggactttacatcctcctcttctacggctgcactgacttgatacccgccatccttgtctttgcagacatatacggtgccaagtcccggaacctttgtatagatatcctttatcttcatctcatatctgacaaatgccacatatgtatccttatactttccaagtttagtatataccttgatattatcataggcttctacaaaacttgctttatctcccagcgactggtaatacttgtccactacgccggtaatctccggatattcatccatccgaagcggattcagctccatgctgctgcatcctctgttctccgtcttcagatcctctgaatttgtcttttgtgctttccgggctttctcgttggtaaggctgaatccggctactccgatcaccagtacaagtacggccagggttatgataatgcctgcccttccccgaaccttgcgcctggcggaatagtctttgcttcttccttccataagactacctccacatataagcacttaaaaaagtacacacccgggcggattcgaaccgccgctcccgcctccggagggcggtgctctatcccctgagctacgggtgcatgtatgattacctttatgaaattgcctttgtaatattaacacatttatccaaaaaagtaaaggaaatgattacgacatttcctttacttttttatttcaggcgatttttcaagctagatccgcaattttttctgcttccggtcataatagtacgcatggtttgaaagcacttcctccggatccacctgcgtctcattgatctctttcaccagcctgcttagttccgcctgtcctggcgcctcactctccggcacgatgatcacctcatggacgctgcttggcagcacataataattttccttaagatagtcgccgatcttttcaagccttccttcgtacaggatcgccgctgcgccgtaactgcggatctcattgcttaagatgtacatcatatcctctttccccttttcttccatgcccgtcaattcctcaatcaccgcccgcatggtctggaattcatccgggagcagcacgtgggtattcctgcatgcccacctatacacgccctccatggtctcgccccacatggcaagatgctcatttcttatcatcatggatgcagtaccatagggagtcacttccagcagtgcatagaagatcaccgccaggtccagatatcgtttatgcggcgcgtttttaagcatctgacgattggattcgcggttgaccagatgatatatgatcttccctctgacacgctcatagtccttaatataatcgcattcaaaagaacttccaaatcgcacttgtgcatacagccttaagatatctcccgcaatctcctccaccgttcctccatgctggaactgctggtagtactcttccagatagatggtgggggatatattgattccctgctccacgatattaagcccctgcctccttgtgccgttattcttgaccgcggtgtggatggaaacggtcacattctcttggatcctctcctttactttcacttccactgcctggataaactggtaataagtcatagaactcctttccttatggcagcatggtattttttcatggtaacgcggcacgaacgcgcctttgaaaagatagaaaaatatgagttgattgattatggtattacaattataaaaaagccccgcaaaaattgcaaggctttttttacaattagcattatactctggaaagatagtctcctgtacgcgtgtcgatcttgatcttctcgcctgattcaacgaacagaggaaccattacctgcgcgcccgtctcaacaatcgccggctttgtagcgcctgttgccgtatcacccttgaatccaggctctgtctccgtaatctcaagttctacgttcagaggcggctctatggcaaatacgctgccctggtaagaactgagcttgacgttttcattctcttttacaaacttcagggaatcccctactgtgtcgttattgacagcaatctggtcataggtctctgtgtccatgaaatagtaaagatctccgtcgttgtagagatactgcatctcttttctgtcgatatgcgcgttctcaaacttttctgttgggcggaatgtcttctcaacaacgccgccgttaataatattctttaactttgtacgtacgaaagccgcaccttttcccggctttacatgctggaattccagaatctggaatacgtttccttcaatctctacagtaaggccgttcttaaaatctcctgctgataccattctataatcctccttagtcgtgcccggatggcactatacgttctttcacttttttcattctataatagattacgccttttttcaacccttttttaccgcataagactcctgcggtaaaagaatagcacgattttctccaaataccgcttcagaacgatctgaaactcttctttcggatgaatcggctttaccagaatattatggattccagccctcttagcaccccatacatcggtaaaaagctgatctccgataaacagcgtgttgctccgatctgtccccatcttctccatggccttgatatagttcttcgtggatggcttatgggcattgtatacataatctgtctggatatcctgattgaacatcttgaccctgggttcctggttattggagatcaggcaactcctgaaaccgatctttctaagcctgtcaaacagcgttatcgccctgttgtccgccggcgcgccatgggggactaacgtattgtctatatcgaagatcaggcccctgtagccttcttcgtacaatttttcaaaatctatgacataggtagatgcaatatacctgtctggataaaacatatcaaacattagcgttcttccatttccgacagtcgctggattagttcctcgcagatctgcaggactgtcttgtcatccgtattaattacgatgtctgctgccgcttcgtatttttcacgacgctgctccataagttcagagatgccctttacattcttccttcctttgagcacaggcctgtcatcgctgtccttcaccctttcatagatggtctccgggcttgcagtcagaagcaccaccctgccgttcttcttcatctccgctacgtttctctctcttaaggcagcgccgccgccgcaggagatcaccgtattcttatgagactgcatttcgatcagcagatttgtctccaggtcacggaagtattcttccccgtatgtagcaaagatatcaggaatactcatctcttcccgttctgcgatcacttgatccatctcgatgatttccatggcaaacatggtactcaggtaatcggatatggtggtctttcctgctcccataaatccaatcagcacaatattgtaatcaaataattttctggcctggattctcttgctgttacgcagaatgcaacggaaaacatcatagatttcctctttgtacttgttatcggcaagtttctcttccagcctcttcttctgtttcgcctcctgctgcggctgcaggatcggcattccatacgtttccttatatgccatgatcttctcaatgatcgcattacgctctaccaacgcgtcaataatcttgtcatcgcacagccccaactgctctctgtacatctctaaatcattcatgtcttatctctcctacttcctatctactttcaaactgttaacaagcatatctgcgcccttccttcgtagggcatacatggtatacacactcgtgtattatatcaatattcccgcactttcgcaagaatttccgtctattttttcaagccatgccgcgacttgacatagtctataaaatcctttgctattggggccagatatttattcttgcaggtaaccatatagatcagcctcctataattcagattctctatttccaggaatgcggcacgcatactgcgtatggccggcacgtccggcacgattccaacgccgaagccttttgccaccagtcctacaagcgcgctgtcttcatccaccatgtaccggatatccggcttttccccttgctctttgaatatctggtctatcacgggccgcaggccgctctcttcattaaagaaaatctggggatagactgccagttccgcaatttccacgctgccccggcttgccagggggtgtcccaatggaaccgccgcaatcagtttctcctgtgccacaggaaagaactccagatctttctgcccctctttcatggagcagaagcctacgtcgtatttttcttcccggattccctttaagattttctctgtcacgccattgtgaaagccgaattccacctccctgtgcgggttctcattcaagaaccctttcaccacctccggtatgaattctcctccctgagtatagatatatcccatgtctatgtgtccgctggtttcgctcgtcatcgctttcatcttgcgtatgcctgcatccagaatgcttaacgcttcttcggcatattccataaatagcctgccgtacttggtcaggacaacattccgtccctgcttttcaaacagataagtccctagctcattttctaacgaggaaatcgcatgacttaaacttggctgcgtgattgacagtttttccgctgctcttgtgtaatgctccatatgtgcaagtgttacaaagtattgtagctgatttaagttcatattttatcctcctttgtcgatttttaccaagtatagcacaatacatagacaaattctatcgtctacgtcaaaaacatgaatttgttttatatttaacgatgaattataatccagttaaagagttaaatcaacggtttaccaactgaaaaaaattggaggatgatactatgaagaataactatccacacgtcttttccacactttccttaagggaaatgaccatgcgaaaccgagttgcaatgatgcccatggggagcgattttgcagggcatgacggccagttaagcgacgagcatatcaaatactatgagttaagagcccggggcggcgcaggcctgatcatcgtagagaacatctgcgtcaaatatccggagggctccaatgggaccacccagctgcggatcgacaaagactgctatattccccgcctgtttgcgctcacggaagcctgtcaccgccatggcgcgtgcatgggcatccagatcaaccacgccggcgcgtccgccatggcgtcccgcattggcatgcagccggtctccgcatccacccttccttccaaggctggcggggacattcctcgtcctctttccaaggaagaattaaagagcattgccaaagactacggcgccgccgcaagacgcgccgtcaacgcggggtttgacctgattgaggttcacgccggccactcctacctgatcagccagttcttgtcgccgaccatgaatgaccgtaccgatgaatttggcggctgtgccaagaaccgcgcaagattctgccgcatggtcattgacgaagtaaggaaggccatcgggccaagagttcccatctcccttcgtctcagcgttgatgaattggtagaaggaggcaattctgtggatgactgcctggaatacctggaatatctcaacgatgaagtagatctttttgatacctcttccgggctgaatccttcaatccaataccagattgatgccaactatctggaagacggctggcgctcttatatggccaaggctgtccgggacaagttcggcaagcccacgattgctatcggcaatatccgcaatcctcaggttgcggaggatatcctggctagaggcgatgcggacttgatcggcatgggccgcggactgatcgccgatcctgactggtgcaacaaggccagatatggggatgtaagagacatccgcaaatgcatctcctgtaatgtcggatgcgtagggaaccgtatcggaggcaacaagccccttagatgcaccatcaatccggatctcatcaatggagaatcctataaaaagacagccgtcaaaaagccatgccacgtagtcgtagtaggcgcaggaaccgccggactggaagccgcctgcaccgcggcggaggtcggatgcaatgttacgctgctggaaaaaaaggattccataggaggcctttctgtagaaatatccaagattcctgccaagaaaagacttgcggacttccctgcatacttgaagcgccgcgcctccaagcttaaaaaccttaaaatcctcaccggcgtggatgctaccttggacgtgatcaaggaacaaaacccccatcttgttgtcaatgcgacaggctctgtccccctccttcctccgattgaagggctgcatgaaaaccttaagaatgaggaggcttgcgtatactctattctggacatgattgaccagatagactcctaccccgaagacatgaccggcaaaaaggtggtcgtcatcggcggcggagcagtcggcctggatgtggtggaattcttcgctccccgcggggcagatactgccatcgtcgagatgcttccgatgatcggaaacgggctggacgcctcgtctaccgccagcatgaaagaatgtatggagaagcaccaggtcagacagatgacgaacaccgcgctgatgaaagtaaatcctcattccttcctggtaaaatacgatggcaaagaggaggagctgcactttgattatggattcgtatgcctgggaatgaaggcaaacgcaccaatctgggacgcgattgcagaagggtttgagggtacagatacggaaatcatcaatatcggcgactcggtccgtgcaagacgcatcatcgatggaacggacgccggccgtcacctggtattgaatacgctggaaaggcttggatatctggactaggaaagcagcaatcgaaaaacagcatgggaaattgcccatgctgtttttcgaatcttctatataacttttatttaagtctatccagctgctttcctacatccttcctgaattgctcccatgccttctcattttccacgaaatactttggacaatccttgccagtcacatcatagtgacgtatcacgtcattcccatctaaatcgaacttcaggcacagccaagcacataattccaccatagattgataggtcttatcgttaaatttcccagtctcatccggatggcagcactcgatggataccgtgtcaaggttccgactgttggacgcataggcctcctcccaggtgggaacgcactggacgatctctccttccaggcctaccacaaagttgctgctcaccttggtctcgtggctgtctttgaggttttcaaaataattccggttgtccatggctgacgctccgggattggcggtatagtgcacgacaacgcctgtaatcttcttcgcctccgttcccggcctggaatacgggttcaccgtcagaagttccacgtcgatgtccggccttgccgcatcgatatccttccctttcagttccacatattcgtccgtaaaccaggcaggcttgacaatcctcagtatttcaaataagactgccaggactaataatataagaagtcccaggcggatattacgccggatctttctctttcgctgcgcgtccgttaatcttctatggtaattcctcttcttcctcatccatactctccgtaaacttttcattcgtttatctggtattatcataccatataatccgcagttttttatgaaaagttacttatgattttctgaagattcacaggctattatcctttgacaaaccggtacgccgttgtagtctcatatacctcccctgccttcacttccggaccctcaaagtgatccttgtgcactgcgtccggaaaatactgggtctcaaagcaggctgcctggcgcatgttatagactgctcctgccttgcccttttcatgatccacaaagttggccgtgtagaattgcatgcccggaagatccgtgtatacctccatagcaatccctgactccttcgatcgcataaatgccgccttgcgatacccatttccgttcagcacccagttatgatcatagcccttgccgaattccagcgcctcataggcttcttctatctctgcccctacaggctttaactgcctgaagtccatcggcgttccgctaaccggcacgatctctcctgtaggaatggactggctgtccgccctggcatatgcatccgcatacagcatcacttcctgatcaagcacggtgccggatgcatggccggacaaattaaaataactatggttggtcagattcatcagggtatccgcatccggaactgcccggtaatgaatctttacctcattgtcctttgtcaatgtatatgtcacactaatctttacattccccgggaacccttggtctccggaagggctgtccatcagaaattccacatggtcctcctgcgtctccccggtcttccaaattcttttattgtaaaaatccctgccgccgtggagggtgttctgtccatcgttacgcgtcagttcataggttcttccacccagccggaattctccgtttccaatacggtttgcgacccttcctatcgtagcgccgaaaaatgcattccccgcctcatatccttgtacatcatcatatcccagcaccacatccagaagtcttccttccttgtcaggaacccttacctgtaccagtgtggctccataatcggacacttttatctccatgcccttatcattctgaatggtaaaaagtcttgcctcttctcccttagatgtcattccaaaactatgtgtcatctctttgcctcctttgaattacaaatctgaattccttgatacgcatagccggattgctagcataggcaaaataccagatcccgtccaggctctgcctgagaggcatcttctcctctatcctcctatccttacaatccgtgggctttaaaaagacgcccggtggatgtttcccttacggacgtcttttatatggctcttaactatatcgcttcttttttactcatctacgctgtagtttggcgcttccttcgtaatatggatatcgtgaggatggctttccttcagggatgcggaagagatcttcacgaactgtcccttctgcttcagatcctcgattgtcggcgcgccgcaatatcccatgcctgaacgcaagccgcccatcagctggaataccgtatcttccaccgtgcctttataggcaacacggccttccacgccttccggaaccagtttcttcgcatccgtctggaaatagcggtccttgcttccgttctccatcgctgcgatggatcccatcccacggtataccttatatttccttccctggtacagttcaaaggttccggggctttcatcgcatcctgcaaagatacttcccatcatgcagacattcgctcctgccgcaattgcctttgtcatatctccggagtacttgattcctccatcggcaataatcggaaccccatacttgtctgccgcctcgtagcaattcatgacagcggtaatctgaggaactccgattcctgcaataatgcgggtggtacagatagaccccggtccgattcccaccttgaccgcatcagcgccgtacttaatcagcgcttccgctgcttttgcggtagccacgtttcctgcaatcacctgcagatccgggaacttgctcttgatcatgtcaaccgtatgcagaacatttgcggaatggccatgagcggagtccagaactaccacgtcgacttttgcgttcaccagttcctgggcccggtcaaggcagtttgccgtaatgccgattgccgcgccgcacagcaggcgtccctgtccgtccttggctgacagcggatacttgatctgcttctcgatatccttgatcgtgatcagtcccttcaggttaaagtccttatccacgatcgggagtttttcctttcttgcctttgccagaatcttcttggcctcgtccaatgtgattccctccggagctgtgattaatccttcggaagtcatggattctttgatcttctttgaaaagtcttcttcgaattttaaatcacggttcgtgatgataccaactaatttctttccttcggtaatcggaacgccggatatccgaaacttcgccatcagattattggcatcctccagagtatgttccggtgacaggtaaaaaggatctgtgattacgccattttcagaacgctttaccttgtccacttcttctgcctgctgctcaataggcatgttcttatgaataataccgatgcccccctgtcttgccatcgcgattgccatacggtgttccgtaaccgtatccattcccgcgctcatcatcggtatgtttaacttaatcttcttggtcaggtaggttgataaatccacttggttcggaatcacttctgaatagcccggaactaagagcacatcatcgaatgtaatcccatctccaattatctttcccatgattatatcctctctttctcttttcaaattttacgattaactgctatgataaccaatctgcgcactatttgtcaacatatttcgaccactttttaaatttacttgcgcacgaccttcctgggggccatcatataaaacccttctacaatcgtatcattcggttcaaatataatcttcttctgctcgcccctctcggatactacaagcgcatagagggcggcttgtccgctcccggaactgtaattataggtcttggccttctggtactggcgtacttcgatagaatcagcgggtgccagaatctcaagatcattgacgttagcggaaaacatccgcttgcgctttgccttgttcataatcttgtcaatatccagatccccattcacaaacaggtactcatactccacattcaacctccggaacatgagcacatccagaataaccgccaggaccggcaggataataccgaatggaaacagaaacacgatcaagacagaaacgatcgtcaccgcaaccagtgccgcctttattacaatatccttcatgcccgcctgtttcttcactaactgttctgtataatagtcgctcatcttttattcctccacaatctatactgaatgccattattgtaccatactttcaggcaaaaagaaaactccccgtcagaggagttttcaaaaatttcatactttatatagctgcagaaatgatttacgttacatcatgcccattccggcccctgctcctgcaggcattgccggtgtctcttccttaatgttggcaacaacagactctgtcgtaagcagtgtagatgcaacgctggtagcgttctgaagagcgcttcttgtaacctttgcaggatccaggattccgctctctaccatatctacatagttttctgtcagcgcgtcgaatccgtatcctggatcagactcttttaccttgttgataattacggaaccttccagtccagcatttgcagcaatatgatacagcggagactccagtgccttcaatactacgttcgcgccagtcttctcatcgccctccaggctttctgccaatgctgccacttcttttgccgcgtggatatatgcagatccgcctcctgcgatgatgccttcttcaactgccgctcttgtggcattcagggcatcttccatacgcatttttgcttccttcatctcagtctcggttgctgctcctacacggattaccgctacgccgcctgccagttttgcaagtctttcctgtaatttttctttatcgaaatcagatgtggtctcttcaatctgagccttgatctgagcgacacggtcagcaatctctttcttgtctcctatgccatccacaataacggtattctctttctggatcttgacggatttggcacgtcctaactgctccatcgtagtctctttcagatccattcccagttcatcagagatcacctgtccgcctgtcaggatcgcgatatctttgagcatctcttttcttctgtctccatatccaggtgcttttacggccgctacattgaaggttccacgcagtttgtttacaatcaatgtggtaagagcctcgccctcaatatcctcagcgatgatcagaagtcttgctccagactgtacgatctgctctaacagaggaagaatatcctggatattggaaatcttcttgtctgtaatcaggatatatggatcttccagatttgcttccatcttatccatatccgttgccatgtatgcggaaacatatccgcggtcaaactgcataccttctaccagatccagttccgtcttcatcgtcttggattcttcgatcgtaattacgccgtcattggaaaccttctccattgcatccgcaaccatctccccaacttctacatcgcctgcggagattgctgcaacttttgcgatctgatctttgtcctttactttgctggacatcttagcgattgcatcaaccgccttgtcagttgcctttttcatgcctttgcgaaggataatcgggtttgcccctgcagccagattcttcataccttcatgaaccattgcctgtgcaagcacggttgctgtggttgtgccatcaccggccacgtcgttggtcttggatgcaacttccttgatcagctgcgctcccatattctcaaaagcatcctcaagctcgatttcttttgcaatcgtaacaccgtcgttcgtgataagcggcgcgccgaaagatttatccaacactacgttacgtccttttggtccaagcgttaccctaacggtatctgccagctggttaactcctgtttccaatgcgcttcttgcctcagcgccatatttaatttcctttgccatgattacattcctcctgctctttctatgctataatcttttttcaaacttcacttctttattcaacgattgcaaggatatcatcctgttttacgatgatatactcttcatcatcaatttcaaccgttgttcctgcatatttagaataaataactttctggcctgtcgcgacattcatcttaacttccttgccatcaactgttccaccaggtccaacagcgattacttctgcctgctgcggtttctctttggactgtccgggaatcacgattccggattttgtagtttcttctgctactaactgttttaatacgactctgtctcccaatggtactaatttcatatttattcctccttaatattatctatatttgttagcactcataaaaagagagtgctaaaagactctagatataaaatagcactctctcgttattttgtcaacaacctttatatttagtttacaagatttttataaaatccattccgaatctggaattttacgattctcccaaccttattccaatatctttccctgatggttccgctacatccgataacgcccttgggcgtgtcgatcctgcattcgtagatgccatccagggagaagaccggaagctgcgtctcatctgataacaaatatatacattcttcttccggattatacgtgattatgctgcaatggtacgttgccttatcaaagaacccttctttcaagatcatacgggtcatcctgatatcagcggaacactcctcatacatgcctgcttctcccttcctaagttcaaataagggtatcagtcgcccgatacccctttatccgtctttcttattttgcacgttctgccttgatatgttccagttccgtaaatacataatcatttacgaccttgatataggttcccttcataccggaagaacgtgactcgatcactccagcgctttcgaatttccggagcgcatttacaatcacggatctggtaatccctacccggtctgcgatcttgctggcaaccaggattccctccgtgccatccagttcctcaaagatatggatgatcgcctccagttctgaataggacagggtgctgatagccgactggacgatatgctccttcctggtctcttcagcgctctcctcatttacggacctgagcatttcaagtcctactaccgttgttccatattcacttaaaataatgtcgtcaatttcatacatctggtctctcttatagataaatagtgttcccagacgctcgcctgcaatatcaatgggggtgatgatggcctgataacccttcaccgcctcttccgaaaatccaagggtctgcaggtttacattctccttggtggataaaatactcagcaggcgctcattcagcatatcatcgatatgcctcccgacttcccgctccagcagttccttgataattggaactccctcgcaattactgccgcccagcactttgccctttttactgactaccagaacattggaatccagtatttcagtaagcacttcgcagatatcattaaatacgaccttgctggaattattattatgcagtaatttgttgatttttctagttttatctaacaattgtacactcattgccattcctccatcctttgattgttatattatcatacaattcaataacattcaatgaatttcctaaatatttttaataatctctttattttccacatatccgcattgttcatcactgcaaagcagcttatttcccttttctaccatatggcttccacacctcggacacttcttcgtcgatggcttctgccaggacataaattcgcaattggggttgtcttcgcacccataatattttcgtcccttcttcgtcttacggatcaccacatccttgccgcagaccgggcaaggcacgccgatcttttccagataaggcttggtattcctgcactccgggaatcccggacaagccaggaaacgtccatggggtccatatttaatgaccatattgcggccgcactggtcacagatcacatccgtaacctcatcttctatcttgactgcttcctgttccttctccgctttttcgacggctttctcaagatccggatagaaattctcgataatcgtcttccatcctacttttccctctgccaccccatcaagaaggctttccatattggctgtgaagttcacgtccacaatgctgggaaaggactgcttcataatattattgaccacttcgccgatctctgtgagataaaggttcttattctccttggccacatatcttctggcaataattgtagaaattgtaggcgcataagtacttgggcggccgatacccagctcctcaagcgtctttaccagcgctgcctccgtataatgggctggcggctgggtgaaatgctgctttgactcaaaactttctttggtaagcctggaatccatatcaaggcctttcagcagcacgttgctttcttccttctcttctcctgcctccgtatatacagaacggaatccttcgaagataatcttggacgctgccaccgtaaaccgatacgttcctgccgcgatcttcacggacgtggtctcgtatctggcaggccgcatcctgctggcaacaaaccgtttccatatcagctggtacagacggaactgatccctggtcagggaatccttcatagctgccggcgtgcgcgatacatccgtaggccttatcgcctcatgggcgtcctggatgatctttttgtcagccccttcttttgcttctcctgctgccacatactcttttccgtaattagacgcgatgtattctcttacactggcgtcagcctcttccgataccctggtggaatccgtacgcagataggtaatgattccgacggtgccattccctttaatgtcaattccctcatagagctgctgggcaatcctcatcgtctttgaggtggcaaaattcagcgctttggatgcttcctgctggagcgtgctggtggtaaaaggaaccggggcctttttaatccgctcgccctttttaatgtctgccacggaataatcggcctgatccacttctttcagaatctgttccagttcttccttggaacggatggtcatcttctttttctctgtgccgtagaatttcgcggtcagaagcttcttctctccttctactttcaagttggcatccagcgtccagtattcttccgggatgaatgcattgatctcttcctcccggtccgcgataatacgaagcgccaccgactgaacccgcccggcactcaagcctctcttgaccttggcccacaaaagagggctgatcctgtatccgacaattcgatccagaacccttctcgcctgctgggcatcaaccagatccatatcaatttctcttgcgtttttaagggatgcttttactgcgttctttgtaatctcattaaaactaatgcggtaagtcttcttattctccaacttcaaggcctggctcaaatgccacgaaatagcctctccttcccggtccgggtcagtcgcgagatacaccttatctgcttttttcacttccttgcgcagatttgccagtatctctcctttcccccgtattgtaatgtacttcggctcataatcatgctcaacgtcaacgcccagctggctcttgggcagatccctgacatgcccgttggatgcggtaaccacataattacttcccagaaattttttaattgtcttcacctttgcaggcgactccacgattacaagatagcgtgccatataactgcttcctccataaaaaacgacttgccggtctttcaccggattcttatataataatttttagatacttctttaatatatccctctaattccagagttatcagcctctccagaagttccttcggacatagtccggtctcttctaataattggccaatgctcttcgggaacaaaccgagacaactatacaccatattttcaggactttcaagcatttttttattttcgtcagaattttgccctggattcatattgctgatttccaattccattaatagatcttccggagataggagaatccctgcgccttgcttgatcagccggtggcagccctggcttgccgggcttgttacggggccaggcagcgcatagacatcctttccctgttccaaggccatatctgcggtaatcaaagagccgcttctttcttttgcttctattataagaactacatctgacagaccgctgatgatccggttccgctccggaaaatatgccggcagcggcggctgtcccggaatctgctccgatatcaggcctccattttcctgaagatccatatacagcccgatatgctctcttggataacagacatcgacgccgcatcctaatataccatatgtccttcctcttccgtttaatgcgcctctttgccctgcgccatcgattcctctcgccatgccgctgatcacttgaactcctgcttttgcaagtttctctccataggcaagcgccatctgctcgccgtaaggagtgcagcgtctggctcctacgatcgctgcgctgggagaatcttctttgggaaggcttccctttacatatagtgcataaggcggattaggaatatgcttcagtttctctggatattccctggaaaaataaggaatgaaccgtatattttcctctttcagccttgcccacctctcctcaatcttcttatctccttgcgccttcctgattgtttcaacatccttcgcgttcagatactcttgaaaatgaagttttgtttcttctatataataaacagttcttccgcttcctaaattttcccttagcatcctctttttcttcggctgaagcggttttatggatgcaagccagtattcatataccaccttttctacctcccccaatatttcttgtctatcgtccggtagctgattgcctctttcagatgatgctcccggattctttcactctcctccatatccgcaatcgtacgtgccacccgcaatatcttatggtaggttcttgccgtcagccccatcgccagatacgcgcgcttcatcagccgttcttcattatcccctaattggcagtacttctccagttccctgacgcccagcagcgcattcgatgttatcccggttcctgcataacgcatgttctggatgtttctggtctttactaccctctttcgtacctcttttgaactttcctggggcttccggacgcttaaggcttcatacttgatccgaggagtttctatacacagatccatacgatccagaaatggctggctgatcctgcccaagtaatgccggatctgtcctggcgtgcaagtgcatttttctaaattcggataattgccgcaagggcatggattcattgcggcaaccagtatgaaattggccggaaacacataggttccatggctgcgggcaatccgaatctgcttttcttccagaggctgtcttaatacttccagaacattcttttgaaattccgccagttcatccagaaacagcacgccttcatgggccaggctgatctctcccggaaccgggaccagcccgccgcctatcaatgcagccttcgtcaccgtgtggtgaacgcttctcaccggtcggcccgtaatcaatggacgctccctgtctaccattccaagaacgctgtaaatcttcgtgatctctatgctttcttccggcgtaggcgacggaagaatggtgggaattctttttgccagcatggatttcccgcttcccggaggtcccaccataagaagattatgaccgcctgcagccgcgacttctgccgctctttttactgcctcctgcccctggatatctccaaagtccacggacaattcctctctccctccttccatcttcccatcctgtcttacttcttctttaagcgccacctctccattcaggtaatcacaggcttctttcaaatgcctgacccctaagatcctgatcccttccaccagtgctccttccgatgcattgcgtatcggaaggatgcaggtgcgacatcctgccctcctggcttccagcacaattggaaggatgcctggaacctcctgaacccttccatccaggcccagttccccgattaccagcgtacgctccagctcctccccctcaatttcacccaaagccgccatcaccgccagggcaattggcaagtcaaaggaagcccccttctttcttaccgtagccggggccagattcactaccaccttcctggctggtatctggatgcccgcgtttcggattgctgttcttaccctttcagatgcttcctttacctcagcggacagatatcctaccatatggaacatgggaagtccattgcttacatccgcctcaacatgaaccatctccacgcgcagcccttggatggaggcggataataccgtatgaaatgccattcgcatcttcctttcttattcttggtaaatcatttgttctataatctgtgatatgcggccgaaacggcccgatagaagccaaagggaaaagacttgccagactggcagtatcgcctcttccccaggcgtgaattataaagaataaaagttccattgacgaggaatcttatccggctttcgcccatacaccgcttcataggcactgctccaaagttcggaaatactatcctcgccttctcttaagtcatccagcacgtaatccggatgcgccgcaaagtatgcaagcacctcctgacacctgccttcatgggaaagggccgtcagataatcgaatacgacccggctttctgtccgcgtcttttccggaagttcctcgcagatccggatgactctgcggtattcctttgtcttcaggataagccgcagcccttctttgacataagacagatcctccttcctcatgccaattcccttttccagccattccgccgcctccgcggaccgttccttttgcatcgcaagcacccccaggccatggcaggcccatgggttctctctcagtctgagcgaataaagaaatgcttctcgagctgcttcttccttcccataatacagatgcatgactcccagctggtaactggcatgccaatccagttcttcttccttcatgccctttaacctctcatagtagcaggcatcgcacataaattcgtccggcctttccctgtcctcccttcgcccaagccttccttcctccaaaagcatggcccagttctccagggattcccccttcatatggtactccagatgggacgacaaaggcctttcgccggccagatccctcctgaggacttccagcgccccaaaaccgctcccttcatacacggcaatgccctttcgcctagccatggttcttgtctttttaagccttccttccaactgctcctcctggattcttgcggcaacctttcctgcaagcgcggcacttaattcttcaaaccccagccgcagttcttccggatgaacctggatgcttccataccgttccatccattcccaggcgctgtggggaggcatcgggatacagccatactgggtctttccaaggcctgcctggatctccacatatctgccggcatcctctgtcaggaattcctgccaccggtctgctccctccttatgtccccaggaaaataatttccttcccctgagtcttttggtagaatactgaagcagtccatagccttcctggttcagattggctataaacttaggactttcttccggtatattaaaaaaatagtcggtctgggaaggaatattctcgtatctggttatatccactccctccacttgcggaatcgaaaccttagaaaccttggcctccctgctggtatatgcttctttggccggaaccacgattcttccgcctgcgtattccggcaccgccatattgctccaccagtacatgggcacaacccggctccctgaattgacgatacgcatccggcagttcaggcaggcatccttctcctccagccagaaatccatctggtattccacgccccggattctctcgtattcatacatgcgcagcaccgggatgcccgcctcctcaagcctggccgtataaagcgggcggacagtaaagggcgtatgcccgatgatgccggtgttccactcgactcccccactgaaccaggcattacacgctgccagattgctgaagcgtatcacatcattggtgtacaaaaggttttcttgccgcctcttatcccaaagttcccacagccttcctccgtattccggaagaaaaaccgcccggagacagtcgttttccaaaacagcagtcttcacccgtcgttctttcagttcgcggctatatgcctggtactggcggtaaggataagcgttctttctggttccatatgcttcaaatatctcatcctcctcatccaggtcaaattccagatcattctgaaggatcgcgcttcctgctatatccggcacgctgctttcctcccccaggctgcatgcccgcattctctttgtctcaaatctcagttctggcttcataccgttccttttccctcctctgtcagcatctggatcgcctgtctcaatgcttcggacttggcaatctgcatcttctcgcagtaggcgtccagacgctccttggtttccttatccatccgcatggagcagataacgtccttattattggttcctctgggccttcccggtcttcccatattcccacatccttttcatcatttccgtaatacatttatatttctattgtaatagatgtattacactaatgcaagcaaaaactgcgcaagtatcaaaaatactcgcgcagtttttcaatggcactcttttcgattctcgaaacataagaacgagagatgcctaactgtttagcaatctcccgctgcgtatactcttcttcgttatacagtccataccgcatcttaagtaccagcctctctctgggcgacagttccgactccacccggtaatacagcatccggatatcgtctcttagttccaccttcttgtgcgcgtcatcctcttctgtctctataatatcgaaaagctggatctcgtttccttccctgtcggttccgatcggctcatacagggagatttctctggaagatttcttttttgcccgaagatgcatgagaatctcgttttcgatacatctggccgcataagtgccaagcctgacacatttatcggggttaaatgtgacgaccgccttaatcaggccaattgtgccgatagacagcagatcctccgtatcctcttcgaaagactgatactttttcacgatgtgtgcaacgaggcgcagattccgttctatcagaatatgtttcgcttcaagatcaccctccgtatatttttgcatataatatctttcttccgcagcagtgaggggttggggaaatgatttcaagaaaagcacctctaagcgtatttgatatagtctatgtgaagcgcggtctttttgtgcttttccattaaaatttctctatacaaaacactggaaagaagttatattaggtatagaaaataattgtggattgaggtatgtcatgaaaaaaacactggggaaagtcctctttttcagtttgctcatcatactggcggctcagctgagcatgaatctttttattgcggattttaagatttccatcgccgtcatctgtgtcccggtatttctctttctgaccgaagggtttccactgatactggttaccatctgctccgcaatcggcgtatttgccttacggacgctcatgtactggttccaatatgcaagcctggatcatacggccttctttcttccggaagcaggattctatatctgttatgggcttcttctctttggctgcacccggattctgaaaggaacattcctgaataagaatctggccgtgattccactgatctttatcgactatggagccaacctggcagaactgctccttcggatccggacggatgcctttgagccaaaggcacaggcaggaatcctgctggtagccctccttcggaccgcagtcatctggtgcatcctgaccatattcgagcgctatcgtctgctgctgctcaagcaggagcatgaagaaagataccataggcttttgatgctgatctcgaagctagacggagaagtcatatggatgcgtaagaatacggcgctgatcgaagagaccatgcgtacatcctacaaattattcgaaaacctgaaatcttccggagcagagcctggacttacatcctctgctctgtccgtggccaaagacattcatgagatcaagaaagaatatctgctgattatgcgtgggatatcagaagcactggatgaagaactgaaaagcgatggcatgcatctggaagaactgctgcttcttctaaaggacgccatggcgctcgtcgccaaagagcaggataaggaacttcttcttacgctggaatacgcagataatccttatacagacaggcattatgcattgatgtccatcttccgcaacctgttcatcaatgccattgaggcagcggcgggtcaaaaggttcggatcgcgcttgccgaggcgtcccagggcgcagattatatcttttccgttacagattatggaactgggatcgagccggattatatgaaccaagtctttcatatcggcttctccactaagattaattacgctaccggggaggtaaaccggggactgggcctgaatctggtgcaggatctggtagaaaacagcttcagcgggcacattgcgctggactcccgtcccggaaagactacgtttaccattaccattcccaaagaacaactggaggtgacagcaacatgaatttttatctgattgatgatgacccaaatattctgaacatattaaaattaattataaccaaccggaggctgggcatcgtctgcggcaccggaagcaccggcatcgaaggcctggaagacatacgcgtcctgaagccggacatcgtgatcgtggatcttctgatgccagagatggacggcatctccttcgtagaaaaagcacgcccgctccttgatgggactgctttcatcatgctctctcaggtatcttcaaaggatatgatctcttccgcctacgaggcaggcattgaattcttcatccaaaagccgatcaacagcgtggaggttgagacggtgatccaaaaggtctcctcttccctgacgatgcaaagaaccctgcataagatgcagaatatcttcatggaagacctccatccccagccaggcaggaataccgaagatcctgcttcggccttccccgagacatcctctgcccttaccgccgtgcttcagcggctgggcatcatcggtgacatcgggtgcaaggatattattactatcgtggaatatctgaccagccgtccgggacagatgaacgaagccactttgaatgaactgtgcagcaaattcagcgattctcccaaatccatggagcagcgcatccgccgtaccgccaatgccggcctggtaaacctggcccaccttggactcgaggattatggcaacgagatatttatcgaatacgcaaacacgctctataacttcgagcaggtgcgccgggagatggattatatccggggcaggagcgagaagcatggaaacgtgaaaatccgtaattttctgaatgccctggtggtctatagcatgaataactagccttatcctccgtaataattaacagtatcattgattcatttttgtgaattatcacaaaatttcaatgatacttattttttttgcgtctgtcctgataccatttgtaactttttgaaacctggcatatatattaattccatcaataacggacctgaattattaataaaagaaatgtgagggaatgcttatgttaacaattgtatctggagtcgggcttcttttggtgacgctggcaggtttctccctgttcagcctgaagatgcccaagggccagcttgccatgtcgggtatggcaaacgctgccatcgcaacgtttctcgtcgaagctgtgcacaaatatattaccggagatctgctggggcttgacttctttcgcacggtcggctctacttccggaagccttggcggcgtagccgccgcaatcatggtgcccatcagcatgggaaccagccccgtccttgccgtcgtggccggggttgccgtaggcggttatggaatccttccgggatttattgccggatatgtaatcgggctgatcgccccggttattgaaaagagattgccggagggcttaaatatcatcggaggcgcgcttctgatcgcccccatggcacgtttgatcgctctggccgcagatccggctgtaaacgtcattctggcgcgtatcggaggcacgatcgccgctgccacggaacagtcccccatcgtcatgggattcctgctgggcggcatcatcaagatgatctgtacctccccgctaagctctatggcgctgaccgctatgctgggccttgacgggcttgccatgggaatcgccgccatcgcgtgcgtaggaggctcctttaccaacggactgatatttgcaaggttaaaattaggagacaggagtaatatcatagctgtaatgctggagccactgacacaggccgacattattacatccaatcctattcctatatattgttccaatttctttggaggcggttttgccgggatttctgccgcagtcttccacatcgtgaataacgcgcctggaactgcatccccgataccaggacttctggcgccgttcgcattcaaccccccaacccaggtgctgctggccgtgttctttgccgtaatcggcggctgcgcggccggcctggccggaagcatggtcttttgcaaaaggatacaggttccaaaggccgattccttggcatcaaaagatgccggaatggaactggaattctaatcacagcttatgccgcgctttttcgaacagcgcgcgaaaatacgggcctgcaaagcgctatgtctttgcaggccctgattctgccgttactttatatctttccgtttatgattccgctcttctaaggatgtcgtactggctggcttcatgatccagttccacatacagtacttgcttcggatgaggggcgctttcctgctcatttccttcctcatctacaattctctgaactgccgtctcgatattttgtccgtccggcttcatgatctcgatcgtctcgcccaccgagaacttgttcctctgctcgatccggtacaggccatccttttcgccgccgatgatcccaagataagtatactccttcacataggtattgctgtcatagatctggctttcatcccccggctttccaaaatagaagcctgtggtaaactggcggtaggtacagttggatatctgatccagataccagggcatgttcttctggtagcgctgcacatcggcaaggtaatcgtcgatggccttacggtaagtcctggctaccgtagccacatagagcgccgtcttcatgcggccttcaatcttgaaactgtcgatccccgcctcgatcatctccgggatatgcccgatcatgcacaagtccttggagttaaagatatacgttccccgctcattttcgtagaccggcatatactctcccggcctggtctcttccacgaccgcatacttccagcggcagggatgggtgcaggcgccctggttcgcgtccctgcccgtaaaataattgctgagcaggcaccttcccgaataggagatgcacatagcgccgtggataaaactttcaatctccatcgcttccgggatgcgatcccttatctcccttatctcctttaaggacagctccctcgcggataccacgcgctttgcgccttgcttccaccagaacagataggttccatagttggtattgttagcctgggtgctgatatggcgctcgattccgggacagatgtctttcgccatctggaagatggcaggatcagcaatgatcagcgcatccgggccgatctcttttaactctttcaggtattcttccactcccggaagatcatcattgtgggccaggatatttaccgtcacatgaaccctcgcgccatgggcgtgggcaaacgcgattccctccttcatatcctccatagaaaaattcttggctttggcccgcaggccaaatgcctcgccgccgatatatacggcatcagcgccgaaaataactgccgtctttaatacttccaggctgctggccgggattagtaattccgggcgtcctcttctcattgttccttctcctatcgctgtgttatttcttccttacactgagggccactccatcccccagtggaaggatggaggtctgaagctgctcattgtgcttcaattcataaagatactcccgcatgcggctgtgaatggtccggttgcgccgctccacggcaaacctggactctatcacgtccccgtcctgaagcacgttgtccgacatcagcacgccttccggcgccagaagccggatggcctccggcagataatggatatactgtcccttggccgcgtccatgaagataaagtcaaaaggcccctcaagggacttcatgatatccagcgcatcgccttccagcagcgtgatccggtccgcaacagcggccctgctaaaattctcccgggcaatgggaatcctcttttcatatttctcaatcgtcgtgatccgtccatcctccggcagataatggctcataagtatggctgaatagccgattgcagttcccacctccagaacacgcaccggcttttttatcagcagcagtactttcaggaaactctgggtttccttgcggatgatcggaacaaaagtctcgatggcttcctgctcgatctgctcgataatcggatcttccggcttctccagggaatggatgtaagttaccatccgctcgtcaactatcatttcgggctacctctttcctttcttttacataccgccaatcgcaatttgggacgtaacactgtcaaaatgttacgtcccctttttattttatacatccataataattggcagtatcattggttttctcttggtacgcttccagatgaattcattcatggtatcgcggattaccagcttgatcttgctccagtcagcattgcgctgatgcatcaggcagtcttccaccgcatcctgcagcacctgtcttgcctcttccatcagcccttcggactcccttacatagacgaatcctctggatacgatatccggtcctgccagcagctggttgcttcccttttccagggtcagcaccacgatcaggattccgtcttctgccagatgctgcctgtcccgaagcacgatatttccaacatcgcctacgcctaagccatccaccaggatctctccggtatggaccttgtccactaccttggcctctttatcgctgacttcaaatacatctcccgagttcaggataaagatattctcctttggaattcccaggttctcggcaagagccgcattggctttcctgtggcggtactcgccatggatcgggatcgcgtatttgggctttaccagggaatagatcaatttcaattcttcctggcaggcatgtccggatacatgggcatcctggaagatgacgtttgctcctttggctgacagttcattgattaccttggatacggatttctcgttgcccgggatcgggttggaactgaatattaccgtatctcccggcatgatggtcaccttcttatgcacatccgccgccatgcgggataatgccgccatggattctccctggcttcccgtcgtaataagaaccgtcttctccggcgggtagttcctaagctggtctatctcgatcagcgtcttgtccggcacgttcagatatcccagttccctggctacctgaatgatatttaccatgctgcgcccttctaccaccaccttgcggtcgtacttgcaggctgaattgataatctgctgcacgcggtcgacgtttgacgcgaacgtggctataataatcctggtattctggtgttctgcaaaaatatggtcaaatgtgattcccaccgtgcgttcggactgggtaaatcccttcctctccgcattcgtactatctgacatcagcgccagcacgcccttcttgccgatctccgcaaaacgctgcagatcgatggcgtcgccgaataccggcgtataatctactttaaagtctcctgtatgcacgacgattccggccggggaatagattgccagagccgctgcatcctggatgctgtggtttgtcttgataaactcgatccgaaactggcccaggttaatggactggccgtgtctgaccactttccttctggtgctgcgcatcaggttgtgttccgtcagtttcttctcgataatacccatggtaagctttgtggcatagattggaaggttcatctccctcaatacataagacaatgctccgatatggtcttcatgtccatgggtaatgacgaatcccttgaccttctggatattgtctttcaaataagtgatatcaggaatcacaagatcgattcccagcatgtcgtcttccgggaatgccagtccgcagtccacgacaataatactgtcttcatattcgaaggcagtgatgttcattccgattttttccaatcctccgagcggaatgatacgcaattttccgttgttttcttttttcaaatttacacctccacgtgcttttccgtactattttgcctctccaggcattctttgcattgtccatagaactttaattcgtggtctaacacatggaatccggtagcgtcctcaatatgacgctccagctcgtccagaaggtcatccttaaaaggaagaacctttccacaagtcttgcatatcaagtggtgatgatggtgatgcctttcttccccatcgaagaattccccgatctcgtaacgcacgcatccatcatcaagattgatacgatccaccaattgcatttctaataacaattgcacagtccggtaaattgtggccagcccgatctccgggtagtcctcttttaccaggtcataaatgtcttccgcagtcatatgcctgtcacggtgatctgcgagcacttctaatacaagcaacctttgattggttaccttaagacccttttctttcagcatttccttgaatttctctttactgatagacataagttttacctttcaatatctacatcttcaagcagttcctcaaacaccttcgctatggctgtcagttccacatcatcgtctacgatctcatagacgctctcaggcgcgttttcctccgatgtatcctttaatatcagacattccgcatcgtcttcttccgaatccgtgaccagaatataggatattccatttaccttcgtctgctcaagtacaaaaaaatctacttcttcctgcatttcttcagacatgaatttaattttttccatataaacacctcaagaatgattcttagttcttgcagatcgagtccagatatccttgcaatataaaaactgccgcaattttatcaatatattttttgcggtcttcacgtcttaccttattctcaattaaagtccgttctgcttctaccgtagtcagacgctcatcccacatcacgacctcaaggccggtccgtcggctaagcatcttcccaaactccaatgatctttccgctcgatctccaatatcgttattcatatgcttcggaaggccgagcacaatccgctccaccttgtactcctcgatcaatgtttcgatccgcgcacaggttttccgcagcttattctcgtccttacggcaaatagtctctattgcctgggcagtaatcccgagtggatcgctgattgcgactcctacggtcttagatccataatccagtcccataattctcatagatattatacccagccgttatgctcaatatacgtcttgagcatctcttccactaattcatcccgttccatcttcataatcaggcttctcgcgccgttgtggcttgtgatatatgtcgggtctcctgacataatatatcccacaatctgattcaccggattatatcctttttcactcagcgccttgtacacaatctcaagtatatctttcgcttgaatctgtggaccgctttctacctgaaaaaactgagtgctgcttaaatctttcatatactcacgtcctccaaaaatacttcaatttcattctaccttattacaaatgaaaattcaatgtaatatttgcaaatggctctcaatttctacatttatcaactgatttgtcaggttttcctccgttttttgaccaatttttacatattctttcgtatgtcccacctgatatatttctccctggcagatcatctcctcttccatcagcacttcctgggtggttccaaccagcgcttcttcataggacgcctgcttccttctcgtcagttccaggagttcattgctccttaccgccttcacgctttccggcacctgttcctccatctgcgccgcccgggttcccgccctcttggaatatttgaacacatgggtctcatagaagtccactttatcaatgaatgccttggactgcgcgaattcttcctccgtctctcccgggaagcccacgatcacatcggtggtcagcgcgggattgtcgaaatacttgcgcagcaatacgcatttttcataatattcttccgatgtataatgccggttcatacgtttcagcgtcgcatcgcacccgctttgcagggacaggtggaagtgggggcacatctttggaaggcctgcgatggtctttgcaaattcctccgtgataatcctgggctcaagcgaccccagacggattctgcggattccttctatctcatggatagagaggatgagcgacagcaggtcatcaccggtatccaccccataggaacttaagtggatgcctgtaagcaccacctctttatatccattcctggcaagttcctctacctcccgtatcacgctgtcatggctgcggcttctgacccttcccctcgcgtaaggaatgatgcagtaagagcagaactggttgcagccatcctgcaccttgatatatgcccttgtatgttccgccgtctggctcaggcgcagttcctcgtactcattgatattgttgatgtctaccagttccttctgtacgccttcctgcattgcctcatgctcgctcaatatctctataatatccttcttccggttatttcccaccacaatgtctatacagtcatcaatctcatccctttttgcctgcacatagcagccgcaggcaaccacgacagccccgggattcatcttcctggccctgtgcagcatctgcctggacttacggtcagccatattcgttaccgtgcacgtattgatgatatagacatccgcgccctccttaaaaggcacgatctcatatccatgctgttcaagcaactcctgcatggcttctgtctcgtatgcatttactttgcaccccagattatgtaaggctactttcttcatatcctgttccaatcctttctatgcaccttgttgtaacatttaacgaaattcttacgaattctttggcaatttgttccttgacttttatcccccttgctcttaagatatttatagaacatgaaaagaaaccaaggagggtatgtccaatgaaatcagtacagatttgtttaaattctatcgataaggtaaaatcttttgtaaatgatatttcaaaatttgactgcgattttgacttagtatccggcagatatgtgatagacgcaaagtctatcatgggaatcttcagcctggatctgtccaagccgattgaactcaacatccatgcaaatgatggtgcagaagaagttctggcaacattacagccatatttagtttaatttatttgtttgattgaaagaaaagggccatcccctaacttgacagggactggccctttttcttttctatttcacctctatgacttccaccgtatcgatggcttctcgcaccaactgttcaatcttttccgccagtttttcttccgatcttcggatcacgtccacattcggcttggttaccggatgctttgccacaaaaatggtacagcagtcctcaaatggctggatcgaagtctcataagtcccgatcttttccgcaatgtcaacaatctcctgcttgtcaaagccaataaccggacggtacaccgggacggtgcacacgtcattggtagccgcaaggctctgcatggtctggcttgccacctgcccgatgctctctcccgtaatcagtcccaggcatccgtccttctttgcaaaatgctccgcaatccgcatcatataacggcgcatgatgatcgtcagttcatcgtgggggcactggtcatagatatagagctggatatccgtaaaattcacgacgtgcagtttcacggacccggaatatctggatacgatcctggccagatccaccactttctgcttggcgcgctcgcttgtatacggcggcgcatggaaatacgtagcctcgatccccacgcccctttttgatatcatatagcctgccaccgggctgtcgattccgccggacagaagcagcatggcttttccattggtgcctaccggcattccgcccgcgcctggaataatctgtgaatacacatagatctcatttctgatctccacattcagcatcacatccggatgatggacatccaccttcgtctccggaaatgcttccagaatcacttctcccagatcgcagttgatctccatggaggtcttgggataagtcttcctggcacgtctcgcctctaccttgaacgtcaggttcttatcggggtacatctcatccatatacgatacgacgtcttctttgagtttctcaaacccctggtcttccatacgcactaccggacagattcctacgatgccgaacacccgcttcaggtgctccaccgtgtcctcatagtcgtaatcaccctcgcagtccacatagattctggcctgggacttgtgcacgtcaaactggccgtccacgtccttaagggcaaaccgtatctgcctgacaagcgcatcttcaaacagataccggttctttcccttaattccaatctctccgtactttaacaaaaatgtgtgaaatctcatcttatctattctcctaatctaatcttcctacagattcttttagcgtctggtatattttcgaagcatcggtactatattatatagtgtatccagggtatagtcaatctcttcacgggttgtaaattctgacatgctgaatcgcaatgtggcatctaagaattcctgccttgccccgattcctttcaggacaccgcttacctgcggatggttcgaggagcaggccgagccggaagatacatagattcccttttctgccagcgcatggagaagcacctcgcttcggattcccccgaatcctacgctgataatgtgaggcgcggatgtctcatcatacagcccatggatcgtggtgttctcaatctggccaatgccctcgataaaatgctgcttaagcctgcgcatcttagccaccttcacgtccagatcctggtagatggttctggctgccagggaaagccctgcaatccccggaacgttctccgttcctgagcggatattcttctgctgctccccgccaaatacgatcggcttgatctttacattttctccaatatataatgcgcccgttcctttcggaccatgaatcttgtggccgctgatggaacacatatctaccttcagcctcttcggatagatgcggtatttgccaaatccctgcaccgcgtccacatggaacaggatgttcctgttataggccttcacgatgctggcagcctcctggataggctggacggagcccacttcattgttgacgtacatgatggataccaggatagtatcttcgcataatgcatccttcagggcatccagcttcacccttccataccggtccaccggcaggaaggtgatacggaatccttcttcttccagatagcgcatggtattgataatagccggatgctcaatggaggtcgtgatcagatgctttcctgccctctgattggcccttgccgcgccaatcagcgcaaggttgtcgctctctgtcccacccgaggtaaagaatacctctttttcctgcaccttccagatctttgccagagtctctttcgcctcttttatatactgctccgcttccacgcctttcgtgtgcctggaagacgggtttccataatcttcgcacatgacctttcgcaccagttcgcccacgctgtcatacgcccgggtggtggcggaattgtccagatagatttctttcatgctttccacttcctatttctatattcttactactagagtatgttcctacccttccaggcggaacattaagatggataatatggcaagccccgccgtctctgtgcgcaggatcctcctgccaagcgtgattaccttggccccttgacggatggccgcatcgacctcttccttttcgaatccgccctccggtccgataaagattcctacagactgtccctgcgcaatggatgctaccacttttctggcctcctccatcccttccgccaattcatacggaatcaaaaggacgtccagctctccggccttttcaagcgcctcctggtaagacaggacggaagatacctgcgggatgtatccccggccggcctgcttggccgcgctttcagcaatctgctgccatcgctgcaacttctttgcggccttcttttcatccagttttaccaccgaccgcctggtggccaccggcaccacctggcttgcccccagttccaccgccttctgcacgatcagttccatcttatcctgcttaggcagtccctggaacaggataatgcggcagggaagttctgtatccaccggcattctctgctgtatcgcaaggaccgcgcggccttcttcatacccttcgaccacgcaccgatatttcagattgtcgccgtcgctgattgctaccgcctctcccggacgcatgcgcagtacgttcttcatatgattcacatccgagccttcaatatagatcctctcaccctccacctgggaaggcgttacaaaaaaatgctgcatcttgctactcctgattctttctggctgttacggatacccactccccctggtggttcacttccagcacttcaaggcctgccgccttcactgcctggaccaccgtctcttccttatcttcgataattccactggtaatgtagattccgccgggcttcatctgattcacgatgactggcgtaagcggtaccagcacgtctgccaggatatttgccgccacgatgtcgtattttccataccctgccttatcctgtacggccttgtcgtcgataatgttgccaatcatgacctcgtattggtcttttcggattccgttgacctccatattctcatgggtcgcgtcaatcgcgcatggatccagatccgtacccacggaatacctggctccgaacttcagcgccagcattcccagaatgccgcttccgcagcctacgtccagaatcatcgtatcatctttcacatactttttgagctggcggatgcataactgcgtagtctcatgcatgcctgtcccgaacgcggtacccggatctatatggatcaccagcttgtcgctgtccttttcctctaccttttcccaggaagggatgacgagaatatcatcgatgtagaactggtggaaatactgcttccagttgttgacccagtccacatcctccgtctgggattcctcgataacgcacgctcctacatccagataagcacgcatcttatccagttccttccttatgttcaaaaggatcgttcccttatcctcttcttcgtccagatagaaggtcagataagccgtgccgtcatccgccggaatatccggcaggatgtccacgaacatctgctccttatcttccttcgtaagaggcaccttgtcctcaatctgcacgccctggattcccagatccatcagcatgctgctgacgatgtcttccgcctgcgtcgtcgtctttagccgaaactgattccacttcataattcgtcccctttcatcttatatcatgcccagatggtccagcagaatcttgcatcccatcagtatgaggatgacgcctcctgccagttctgccttggactggtatttcgtcccaaatatattgcctattttaacacctgccacggataaagtaaatgtaattgccccaataaaacttaccgcaggcacgatctccacctgcaggaaggcaaatgtcacccctaccgccagagcgtcgatgctggttgcgacagccagtcccagcatggtcctgacatccagagacgcatccgcgtcctggcactcatcgcaggagccaaacgcctcccgtatcatattggcgccgataattcccagcaggataaaagcgatccaatggtctaccgaagtaatcacctctttaaactggactcccagaaagaagcctatcagcggcatcaacgcctgaaacgcgccaaaatataatcccacgatcccagccttgccccatgtgcagcgcttcatcgcaaggcccttacagacggataccgcgaacgcatccatggaaagccctactgctatcaggaataattctataatattcatgttctctctcctaacctttttctcctggcgcagaacaaagaatgtgccctgcgcattctcgcgccgtcagcggccatctactatgagccaaaattttcaaagcagaggttcagatctacatttccttcgattcccggcacctttcctttttccgtatactgccacatggaaaattcataagggcactgggggaggggctcataatccgcataccatttcttatatcctgccagttcgttcaaatcaagcgtaaaagccatccatttcatattggcatagatcattgtctcatacccggcctcctttaccgcatcacagaatgtgacgcagtttgcggtgaactgctcttttttcagatgatctgtcctggcttcctcatttttgatttcttcagtatcgaataccaccggataagtgacagcgtaaggccggattcgttccagtacgaactgcgcctcttcataagcctcttctttgtctaccgcctgtgagaagaaatagactcccacgtcaaggcctgccgcaagcgcgccttccatgtggcttttgaacatggcgtcctccacaagtcttccttcctgtccgtatccccgaaagcctacgcgtatgatcgcgaagtctatgccgcttgccttcaccttgctccagtccacggatggctgatattcggacacgtctatcccggccttagagagaatgtttcccgcttcgtccgtatagtgctggtatccgtctttcttttttattcgcttcagatcgtatgtatttttcggcaccgcttccagaagttcggcctcatactgctgccccagcacatctacaaactggtagacctccttgtttccatccgcctggtctttcgcttcttccttcttatccgtgttctggcaccctgccgcaagcagggcggccagtaatacaaacattgtcttaatccatctctttttaatcatcatgacccttctatttgttacgcttcaaaagccgcaaaatgagcattggcaagcagttgttctgcttccgcttccgtcagcccataagaatctgccaggtattggaattccttccctacccaggtgtctgataccgtcatattgtcgctgtttaccgtcaccgtgatcccccgcctcagataggttctcaagggataatcagctatattctctactgccttggtctgtagattgctgatggggcacatctcaagaggaatctccctgcttgccagcagttccatcagttcctcgtcctcaatcgcccggaccccatgtccaatcctggcagcgccgaactctaccgccttgcggatgctggcaggacccgccgcctctcctgcgtggatggtaaagggaaccccaagttccctggcaagcgcaaattcttcctcgtaatctgccgtgggaaacaatgcttccgcccccgccaggtcaacggccgccactcctctgcccagatacctggaagccagacgcaccgtctgaaggttcgcttgcttattatcctgtccccgcatgcagcatagaatcgtccgcagccggatatcgctgtcttcctgcgccttagcaagccctgagagcaccgctgcaaccgcttgttcctggcccatgcctttctggcagtgcagctgcggggcaaagcgcacctcggcataacgcagccccttttccttaaggttcacgcccagatcccttgcggcctggtacaatccttgttccatctgcagaaccttcagcaaagtgtcaaagcatcccagatactcgttcaagcttttacagtccatcccagcgcagatataaggctttaatccatccgccgtatctgccggaagcctgattccttcttccttcgcaatccgcaatatggtctctgccggcagggagccatccagatgaagatgcagatctatctgtccaaactttgacatattcatagaagttcttcccattccttttctttaaagcctgtcagaaccgtatcctgtgtcacaagaatcgggcgttttaccagcatgccgtccgaagccagtatctcatactgctcttcttctgtcatctggggcagacgttcttttaacttctgctctttgtacagcatgccgctggtattaaagaatttcttaagcggcagattgctcttttcatgccactcttttaattcttccttggttggattctgaatcttaatgtctctttcttcgaactccattcccttctcctgaagccatttcctggctttctggcaggtcgtgcattttggatagcatacgaataacatctgtacattcctccttctttctatttaaactttatttcagcgccgtgttcaaatcctgctccacttcatccagttcctcgaggatctcctgccgctgctcgtcaaacagcaggcgcttattgtaacggtaatatttgtcgcagtcgttttccttcaggaattggatgctgtaataattagtgttcaattccgttacaaaggccaccatctcctggctgtctccaaaagcatcctccataaaatcaaaggcatgctcaagcgcatttcccgccttctcgatcatccgctccctctcgcccgtctctttcgtaaattcttccttcacccggtcaaatgccgcctctttatcaagatgttccgccttcgccagctgacggtatccctccagggtatcggagacttttcttcggatgcggtcttcctgcctggtcagctgctccgcctttcttaagcgttcataggtttctgcaaactcccggatcgcgcccgcaagatccagatcctctttataacggcgaaggacatcgtatagaattgttacataacgatccgagacatagcactccttgaacaagcctcccagctggcccagcagcatgttgaccacgctcaggcgctcatcgaaggatgcgtatcttaacttctccagcatatctttgtcataatagccttccagtatcttctcgaggccataatcctttttatacttctcatataattccagataattcgcgaaatcctttgcaatcttccagtgctggatatactggtgcaccacttcccggtctgccttcttatggagcgcctcgtaagacttcagaagctgcgacaggtcttcccatcctctggccgttgcaaacatcttgccgtctaccgtagtctcgatgcggtagaaatggtctcttcgtatctccagataagagagaatggccggatgaatctctgcctgataagcatattccttccaaacatcataattttcttccacatctatcttcttaatccgatccagcgtcaccacgtcaaaatcccttaccgacttattatactccggaggattgcccgcggcaacgataatccagccttccggcaccttctggtttccgaatgtcttgcactgcaggaattggagcatggtaggcgccagcgtctcggatacgcagttgatctcatcgataaacaagatgccttccgcaatcccggtggcctcgatcttttcatagacggacgcgatgatctcgctcatcgtatattccgtcacggaatactgctttctgccaaaagtcttttcccgtataaacggaagcccgatggcgctctgcctggtgtgatgcgtaatggtataggcgaccaggccaatctggcactccttggcaatctgctccataatctgcgtcttcccgattcccggaggccccatcagcaggatcgggcgctggcggattgccggtatcatatagtccccataggcgtcttttttaagatatgcctctatggaatctttaatttccttcttcgctctttttatgtccatggtcttgtaatcctttctcttctttcttccccagtctctggcggcgcttatggcctttgcaggtcttcttcctcaagcaccagcttcatggcccacggcggaacgtctacatcttcatagtcttccttcatgaacacgaaggccgtctcatatgggggcatcttagacggataggtgcctcttccgtctgtaaaatacagcagcccttttaaccgctcaaacgcatgctgctttatcaggctctccacataggcaaaagccgggcgaaaatccgttccgccttctcctttcaattccaggtgccccatgtaatccttcaggtcctcctcgctttcgatcttttgatccgtctgtacctggtcatcgcactggatgatatgaatgttcaccttcctgaagaaactgttattttcgcttaagaccccgtaagtctcctccaagaacttcttgaccagctcgccggagcaggacatggacgtgtcgatcacaattgcaaattcctctaccttctgcacttccttccattcctggggctcgatcagcggcatgttcccgtagaaggaaaggccataactgtagaatacatagtcaaacgtatcttcatctactgccatctcttctttcagaaccgagaattttcgcaggaactggcggtagtcaaaccgcacccggttctccacttttacctgatcgatcagatggccggattcctgtgatgcttctttggaaaatgtctccatatccgtctccatctgctcgctgatatcctgccactggttctcgatctggctctgcttcttctgatcatcatccgccggccagtaactatggtcatccacccggaattcgcctgcaaggcgcgcaaattcggcttctgacagattccatttttccagagccccatagactttctcggccgtcagaaccttcatctcttttccaagccttcggtaggtctctcttctgagccaggatcggcttcttaagacgcagcggtgtcgcatgccgtcgatgatcgactctgtcacgatatcgcaggccaggctgtatcgttcctcctccctgccctttcgccggatcatatggcggaatatgccatgaagcaccagatgcagatatatcctgttcaccatgacccggtcctcccggtacaaaccgcccagatactgggggttgtaatacagataaagcccatcggttcccatcccgcaagccccctcgtccaggacaaagataaggctcgaaagtgccacatccatgaaccgcatcttgagatacagttcattgccggccgcagccagaatctttctgcctatgctatctagtttttctcccatatcgattttactttccatcgtcacttccatacacctattctatcgattcatttacaaatcaaatgcctttttcttcttaggatgcagtctttgcttctcatccataagaagactgagcatttctgtcttcttgctttttgctgcccattccagggcataatccagagcggataccgtcagatacccctgtccggcgaggaatttcatgccttccatatcttcggtttctactaaaaatttcaccgcttcttcccggtgggcgcataggtaggagacgtatgcttccctcccgtcttctgcaagcctaaagggatgcctaagccttccaagcaccagttccgccgccgtctgcaaggattcttccgccaccgtccggtacagcagttcgtcgtatttcttatagtccagctcccggttgtaaaagcattgcctgtagtatccgccagccccatggcggcgcgtctccaatatcctggcaggcgtattctccaccgcctcttcatagtgttctggaaataatacctctgctgtctctatatattcttctctgcccgcctctttcttatgataataaagtttcgcacggattgcaaaccgaatctcatccacgatagacttcaggcagcttctctccccctgatagaaatgaatctccacttcttccagacggcagccggtgaatgctcctcctccgatatccagcaggctgtctgtaaggatcagccgctttaaattcctgcatcggtaaaacgcgtatcttccgatctccgtcacctgggaaggaagccatatctgcgtcacctgggatgcgcagaccctgcttccggcgctggaaagactgccgccttcacttacgaatacatattctccttcatcctcgggcttctcggcaaatgcataggctgcaatcctggtaaccggaatcccttctatctcatccggaaggattaactgtccctgagggccataacagcccgtaatctcaattccctgctccgtttttttataatgaatctttggacatatttgtctcttttcctttttccacataaaaccaacctcgcaatatattaaacaggtattattgtaccacaaaatctgctataatgataaccatgggaatatttacattctaaaatcaaaagaaaagagagagaacatcatgaaacgtaaacttacatttcagcaatacatcgctgtggccagcatgctgtttggccttttttttggtgcaggaaacctgatatttccggtttccatgggccaaatggccggacgcagggtatggccggccatttttggatttctaatcaccggggtggggctgcctcttcttggggtggccgccctgggcatgagccgctgcaatggcctggcagagatgagccaaagaatcgggaaaaaatatggcaccttctttacctgtgccctctatctgaccattgggcctttctttgccattccacgctgcgccaccgttccatttgccgtaggaatcgagccgattcttggaaaaggctcctcggatgccttgccgctggctgtcttttcattgctcttcttccttgcggtcttatggttctccttaaggccaggcaagatccttacctggatcggcaaggtcttgaatccgatcttccttgccgcacttggcctgctggtgatcactgcccttcttcgccctatgggagatatcggaagcatcgctccccaggccggctatgcctcccacgccttctcccagggcttcctggaaggctacaataccatggatgcattggcagggctggcttttgggatcatcgtggtaaatgtcatcaaaagcctgggtgtagaaaattccggcgatgtggcaaaatgcacggtaaaagccgggcttttcagcacgattctaatggccgtcatctatctgctggttacgatcataggaacccagagccgtgggatgtacgaggccagttccaacggaggagaagcgcttcttttgatcgcaagccactattatggcagggctggcgctttcatccttgccttcaccgtcacttttgcctgccttaagacttccatcggactgatcaccagctgcagcgagactttctgcgccatgtttccccggacgctgaattataagaaatgggctgtcctgttctgtgcgctttctttgctcatcgccaacctgggcttaaattccatcatcgcctactctcttccggtattgatgtttttatatcccctggcgatcacgctgatcttcctaagtttggccggaaagttctttgccgatgacaagaaggtctatatcagcgtcactgcatgcaccatctttgccgcagccctggactttctcaatgcccttccgaaggggattaagaacctgctgcatctgaagccgctgctggccggggtctccagatacctgcctctttttgagcagggaatgggctgggtatgtcctgcccttctgggcctgaccatcggaatctgccttcacgcccgaaaaaaacaaagcctgccctcttaggagcaggcactgtgggtctgtctaataatatcccttccacatatttacatacatgtggatattcgtcttgagatagaggccgatcgtcgttagaaggctatccccttccggccgtttggaagccgccattacatatttgacgccagccttcctcgcatagtggtctgcctttcgcagatgccatccattagtaactactacacaatctttaaatccgcagtgttccatcatctggctggcatacagtagattatgatacgtgctgactgcctgcttttcttccagtatgtattcttcaggaactcccagttccacagcatagcgtttcatagccggcgcctctgcaaatgcgttgtacaccgcggctcctgacataatcagatactttaccttcttatctttccataattctactgccttttccacgcgggccgcaagcctcttagaaggcgtgccgtctgctcctacctggcagccgcagacaaccgcgcagtcatatgcatcctgttcccaccgcttctttggctttcggaacatcaggccaaacagcgccaagtttgccgccgcaaaccctaaagttatccacagaaaccgatatgctctatttttcatctaatcttcctcccctcttaatccaaagtcccttccatatccacgggaccttccatctgcgcttcctggggaagcaggcccgcaagccggtcaatccattcttttttcatattatcattcatataatcactctcaatccatgcatagtctttatatattttactcctatttcctgtatttttcaagaccagcctacttttgtggtaaatatgcaaaattcctcatatatatgttgtaaaaatatctatcggagttcctatgccatccagaaataaaatctttaaaaccgcaggcgtcatcctcctattcagcatagcctttttcggaggaaggctggcagcagccaggttcgccccggcagattctgcccggatcgttcctgcccctgaaaactgggggctgggcttccaggaagacgggaaacttccaacgggcaatgccaccattgatgaattaaaaaaatacgatgcctactatgctgaagatacacaggaaaaggtgctttatctgacctttgactgcggttacgaaaatgggaatatcgagcctatgctggatgccctgaaaaagcacaaggcgccagccacctttttcgtagtcggcaacctcctctctaccagtccggatatcatcaagcggatcaataaagaaggccatacggtaggcaaccatacataccatcacccggatatgtccagcatctccaccaaggatgcatttgataaagaattaaaaggtgtggaggatctgtataaagagatcaccggcgaagccatgaccaagtactaccgtcctccgcaaggaaaatacagtatcgaaaaccttcagatggccaaggatcttggctaccatacctttttctggagtctggcttacgtggattggattgaagacgagcagccaagcaaggaagaagcctttgacaaactgctgacccgtatccatccgggcgccatcgtgctgcttcacagcacctccaaaaccaatgcggagattctggatgagttgctgaccaaatgggaagaaatgggatatacgtttaagtccttggaccaactgattggcaaataattaaagatattgaacaagtccgcagaagatgcaatctgctcttctgcggacgaatccacacactgcccagcctgcttatatttccagccgcttctttaattcttcaatctgctttctcaattctgtattttctgacttgctttcttccagttcccggcctttttcctccagttctttggcctttccttccagttcctcctgcatctcatcaatcatatactgtattgcgatccagttcgcgcaattccttggaaaacatattcatcaccttctccgtattcctgcacatctcatatacctcttcatacatagagcgaaaataaggatatttctctaccagatctgtaactaaaagattttttcttttcactctttactcttttgtactgccttaacaataaatcggccgaatagcaggcactgcgctggcctggaaacagatagccgactttttgcacctctacatttgcaatacttccgtcctctaactctatgtccaattagcagagataggaactcctccagcctttctggcgctgcatccggattctctcttctaagctgctccataatccgccgtcttctcttctcgatcaattccagcaccaccgtccggttatcttcttccgtcaagacagcagcgtttctgccatcaccaccactgccaccataaggccccgtcctgccacctggcttaaatcaacgtctccaaaagccggaagcaccagtcctggcatgcccggctctacttcggcatgaatcttctggctgccacgatgatcgccagcgatacggctccaagcgcaacggacagcagattcacatgtctaagcgcatcccgtatatcttcaagcagttccagaagatctcccgaaccagagccgcttcccagaaccttcggaatctacatcaggatgatgccctccagttctttctatgtcggccgttatagaatttttgctactctaccgtaaccgactttgccagatttctcggcttatctacatcgcagccgcggcccaccgcaatataatacgcgaaaagctgcagcggaataatggccagcgaattggtaaagtatttgtttgtctccggaatgtagatgacataatcggcggcacgctccacctccgtattgccctccgtagtcaccgccatgacgaaagcgccccgggtacgtacttcctccatattgctgatcatcttcttatataaatccttctgggtcaaaacggatgctaccagcgtgccgtcctccaccagggagatggtgccatgctttaattctcctgccgcgtatgcctctgaatggatataggagatctcctttaacttcaaagatccttccatagagatggcatggtcgattccacgtccgataaagaacacatcccttgctgccagataacggttagcaaacttctggatattcaccttattattgagcagcatctccacctgtgccggaatggccttcagatcttccagcattcctgcaaggcctgcctcgtccagcatcccttttacgtgggcaaacttcattgccagaagatagagcgcgatcaactgtgcagagtacgccttggttgtggcaaccgcaatctcaggtccggcccaggtatacatgacattgtctgcttctcttgcaatggaacttccaaccacatttacgatcccaagaacccttgcgcccttttccttagactcgcgcaaggctgccagcgtatccgcagtctccccggactggctgatcacgataaccagcgtattttcatccagaatcggatcccggtaacggaattcagaagccacatctacctccaccggaatccgcgccagtccttcgaatatatatttactggtatatccggtatgggaggcagagccgcaggccacgatctggatcttttggatcttcagaatctcctcatccgtcatccccagttcctcgatcacgatcttcccctccttgatccttggggaaaatgtatctgtgatggcttttggctgctcatacatttcctttagcataaagtgttcatatccgctcttttccgctgcattcacgtcccactcgatacgggtagcctgcttttctataggctcttcatccacattgaaaaactccatggaatcttccctcatgcgaacgatctcttcattctcaataaagaacacgtccctggtatacttaaggactgccgggacatctgacgccagaatgcttcccccgtccgtatgtcctacgataagcgggctatccttgcggacggcatacaattctcccggatgatcctggaaaattattcccaaagcataggacccctccatccggtgcatgattttcgtcactgcctgcagcggattaccatgataataatagtccagaagatgggcgatcacctctgtgtccgtctccgatacgaattcataaccatgattttctaactttttctttaactttaggtaattctcaatgattccattgtgcactaccacaatgcttttatccttgttaaagtgtggatgtgcattgatatcagacggcgatccgtgggtcgcccatcgcgtatgtccgattcccaaagtgccgggaagggttgccccgtcatgggtcagctcgtttaacactttcagccgtcccttggactttaccatgtcaatctcatttccattatagacagcgataccggacgaatcataccctctgtattccagtttggataaaccgtccaaaagaatcggcgctgcctgctggttgcctatgtatcctactattccacacatattttctactccttaccttgcatttgcacaaattaccatattttttgcattatcattctgtattgtagcaaaatatcgagggtatgtaaataaaagccttgaaataaatgaaaaaatagaacggagcaatctccgttctattttgagatttataatagcatttaatccaaatcaataaaatcaactttaaatgtatcgtcttcttccatatggccccgcttcttacttggctggctgctcagcagttcatccaggtcatcaatcagttcctcggattcatcgccgtcattatcatatccgtagtcttcctcataatccacttcgtcatattcttcttcgaaatccgcttcttctccaaaatcgtcaaagtcgtcatcatcaaactcctcgaaatcgtcaaaatcatcctcgtcttcgaccttggctttctgcactggctctctcacggcaggctcgccctttgcggcaactgcctttgcttttttaccctttgccggaaccgcctcttcctcgtccagatcaattccatattcatcatacaggtcatccagttccagattgcggtggtgtagcttcacgccgattacaatcaatgccacaaccagtacaaggaaggcagcgattgccacgataaccagaatatccagaaaatcttcgataaactgaaggatctttccccagagtccctttggcgatgccttatcggctgtatcatcggaaccagaatgctttaagtatctctgataagtcttatctaccgtatcatactggtacaggcctttctgcccatccttattcagggcatacatcacataatactctgcattatccgtatcctgccatgctgtaaagtccttgccattcaaggtgaaggtagtcttctgatactgctttggaagtttgacgcttccatcgtctctcaataagacgatataactctcctgggatatcttaatttcttcaaaaggggagaaggagccgtcattgctgttatagaggaaaaagtcgccgtctccgccctctgccggtaccaaatacatggccgactcgccgctggcctcctgggtaattacctggcaggcagcgccttcaaatgtcgtctcgcctctgacaaatccttccggaattaatgcatccgtaaaatcattactgatcttgtactgtacgccgtcaacctcaacctgtgatccatcgccggttggagccgcagttccttcatcctcattctgaatcaaggttggatctccagggccaatggttaccgaagaacttcccttggtgatctgaagcgcacctccggatgcgtccgttccagaggcatctgatacctccaccttcgcgtttccctctgccaacgcctggaaggtaatcttatattccagcgtagtcccggagccactgcccgagatattcagggttccatcgccgccggatacgctgtcgccgctgatgaatttcagcatgctggtatcataagtcagtgtcgcatccagagactgaagattggaagatgatgttaactttgctgttacttctacctctgcccccaccgtcgtagaagggtctgtaaatcgtaattccgcagatgccgcatggacaatcatggaaatgcacggacttagcatgcacaccacagcgaatgccgcaagtgctttcttaattctcctcatgtattctacctcgtttttctctatactccattttatgaacagctattgggttcctgcatccggggtgccttccgccccgccgccggaagtatcgcccccacttcctccgctgccatcatctccgcctggatcaggctgcggctgcgggtctggctccggcgtaggggttggcgtgggagttggcgtaggagtcggctggctgcttccgccactggtgccgccggaagaaggcgtctttgttccgccgctgcttccgccacccgtataactttcatccggctgctgcatgattccctggctatcctcgtccgtatccgcctgccggtctccggcctttgccacaattttaccactgatcgtattcaccgtagaggacggcgaatatgtatcgccttctccatagaagaatttatgaagctgttccacattcttgtccagcgtgacaggaatgacgacgcttccaatattggccagtgtatccgtagtcttatcaaacggaaagccgatggtctctcctaacttatagtcaaatgcatcctttgcgtattccaatatctccgctaacgtgaaattcgtcgatacttctggaaataccttgtcaataatcttattaatctgcgcaagactggcgccctgtaatttccctacaatcttcgtcagcacatccctctggcgttctgcccgcttgaaatcgtctccggcggtatagcgaatcctggcatacgccgtagcctggattccattcagcgtctgtacgccaggctctgtaactccggctgattctctgcccgtcacacgcatgatttccatcgcatagccgcagatatacggaatctcttcttcctgtacgtcaatctccacgccgcccacagcgtctatgacatcgatcagggagttaaaattcaccgtaacataatgttcgatatccatatcaagattcttattcagcatggcgactgccgtttcgggcccgccaaaagaataggctgcgttcgccttattaagcgtcccgtcgctctgttctaaaagtgtatcacgatatacggaagagattttcacttccatggtctcccggttaaggcttgcgatcatgatcgtgtcgctccttgtatccttctccagttcattatcccgcgaatctacgccgaacaatgctacattcagatatccggttcctctctcccgggcttcctcggacacattaagcgcctccggatccagtttcgtcgtctctatcttggagagtttgctggccagaatcaccgctccggctgtggcaaccaatgctaccgttccaccaagaatggctccaatcttcttacccaacgaccaggaagcaaatccacgcctcttggatctgcgcccgcgtctgtaatgttttctcgtctttgccattatccaatatcctttcttctcaccttgcttatgataacaccttacactatattaccctatttcctgccaaacttcaattaaaaatccaggtttttcgcctatttgccccaatatgtcgtgctcatggaacaccattttactacccattgaggaagttttcgataattttgtcctaatttgtatcccagatacttgcatccgcttttgtatgccagaactggtatcagatacggcttcctgctctttaacagatatcccatggtattctttaccagccggatcccctcgctctccgagcgaacctgggaaaacacctccgggttatccgcctgagacactgccaggtcgaagttcctgtgaaactgctgcagccccgaataattatgggaatgaatcaccctggcccccgccgcataggcgaccttatacccagcctgaaccattcggcctgccagaatcatatcctcattaaatatcgttctcctggaaaatccccccagcgcttcatacacgtccctgcggtacgctgcgcaaacgttggaacagaaaaaagtcttgatccccagttccgggatgtcttctttccccttgatacggctttcctccggatagttgaacctccttgtataacgttctatgaaatcacaatcactggccggaagctgccgtgcgtaggatacgcccacaagttcctcccccagaggctcgatcaggttctcgatcagcctggaatctgccggcatggcatcctgggtcatgaataccactatcttggcatctgacatggaaaaaccaaggttcctggtggccccatggtcaaagtcctcctgatcaatatgcgagacgatgactcccggaatatgctcgacatcctcgggaaaacgatctgatcttgtattaatgacatagatatgcctgatggggcaactctgctttccaagccttttcagcagttcctccagtctcccatccggccggtaggtcggtatgactacatctacccgctctggattattcatctttttgttcatcctttttcttattcttatcgtatcctacaaaccagcacatcattcctgtaagaatcagccagaaccaagtcgtaggattgctgaaccaggtggtaaaaaatgcaagtcccagatagattgctatctgcccgtagaacagataggataccgggttctggctcttctttacaatactcatcaaaaccttcgcaaccgctcctacaatcaccgcaaatataaatacgccgacaattccaaaatcataataggcatcatagaacatggtcagcgtggtcaactccttcttcgtcaggaagatggggaaggataccagctgcggatagagaaactttaacccggtcagcgcaaaaaacgggaacagcatctttaatccataggtatgctccgtcaactgtgccaccatgcagttaaaattctcaaagttattggccacatacatgtagggctgggtgataaagatgggcatcttgctgtatttcatctcgaatatgctatttaagtatgccacatcatggtggcggaacaccgtcagtattatatatacaggcaccaacgccaccagaagtattaccatcgtcctgagccggatccttttattgaccatgatatatgcaaccaccgcaaatcctacggcaaacagaagctggaatctggatacgcataagaatggcactgctacggccgtaaagtttgccagtaccagtgctgctatttttttccatccaatgtgtctgctcactttcaagtaaaggaccgtgatagccggtatcagaatgcagctgatggtaaagtagtgaactcctgatacatggaaatatgaataggcatgaggctcgtcggagaataaggggataaatcccaccttaagcgcttcaaaagcaaaacatgctatcgagaccaccatcagccctataatgcagatgaatagccttcctgattgaaattcgttcttttccagttcccgctcttctacctttccatacttctgcccccattcatatccgatgccaaagccgatatagatcaggaagaaactcagccaggtaatatactgccagtcactctgcagtttgctcagctgcatgcaggcgattccctgtcctccgacccaggccaatgtaaaaagcgcccgaagctcgaccaggcttccggtctcccttacccagtggacatagagatagagggcctcgcccatcagcaatatacctgacagataataaagccctgccagtgaagcaatataactggccagaaacaccagcatatatgtgccatattccattataatgttattgcgctccctcattacttatgtctccttcaaacgtggtattcatcgcatccgtatcttccgtaactccggtaagatagatgatgtcatcattgatctgcgttaccttctccgatggctcgtaggaatcctctttaaacagattccggtgaagctgggttacattattggtaaatccaatcggcacgacataagagccttcatgattccttacgtcctccctggtggttacctgataagggaatccaccggtctgcacgatgttataattcaaagcgttggctgcaaatcccagcagatcctgggtggaaaagctggtagaaatcatcggaaagatctcatcgatcatcttgttcaatgtcagcaggttcgccttcttagccttttccgccgtcttctccaggacgatccgctggcgctccgcccgcttgaagtccatgccctcggtatacctgattctggcataggccaccgcgtgcacgccgtccaccttctgggtcccatcctttacctcgatatcttcccagtcctttccagccacttccgcagtttccaccgcatacttgttgcaccagtcggcctcttccgcggtcatatccagttccaggccgccaagcaggtcaatggtattcaccagcgcggtaaagttcacgctgacataattgtggatgtccagatcaaaattccgattcagaaggctgatcgcctcttccggacctccccggttataagccgaattggccttctcatatgttccgtctttctgctgaagcaaggtatcccggtagatggaggtcaatgtcacatcgctcgtatcattgttgatgcttgcaatcataatacagtcgctctgtactccgccgtccagttcgtcgtttctggaatccaggccgaacagggcgatattcgtatacggcccggtatctttatatgcctccaggttcttgtcattcaggatattaaaatccagcttatccagtttgaatattccgtaggccgtcacgcataaggccgccaggatcagcacctctgcaaccagaagggcgattcttttcctgcgcctcttgcgcattaatttctgtctctctgcacgtgtcattctgttcttcatgcgcttctttttactcatacgtttctcccttgcggattaatatgcgttcttgttcacaaatcccttgaaaaatgtcagaaataaaatcttaaaatcgaaccccaacgtccagttctcaatatagtacaggtcatgctcgatccgtttccgaattgacgtatccccccggtagccattgacctgggcccatcctgtcagacccggacgcacctggtgctttaccatatacctgggaatctcttcccggaatttctccacaaactgcggacgctccggccttggtcctaccaggctcatatcccctttgagtacgttgaacagttgaggaagctcgtcaatgctcgtcttgcggatgaattttccaataggagtcaccctgggatcattctgtaccgtccattttgccttctccgatgccgcatcctgcactaccatggagcggaacttgtacatggggaaaggcttattctgaaggccgatgcgctcctgcctaaatatcagaggtccaggcgaagttgccttgatgattacagacacgacagccataaccggcgaaaatagaatcagggccacaatggctccaaataggtccacgcagcgcttggaaaacgcattcagcgcgttgctaagcggcacatggcggatattgatgaccggaaggccaagaaggtcttccgtataaggcttggtcggtataatattattataatccggtataaacttggtatgcacgccggacttctcgcacatgctgacaatatgctccagcttgtggtattctgccagccccagggtaatggcaatctcgtccagcttgttctgcggcaggatgatggtcaggttctccacccgtcccagcaccttgatcccccggtactccgtgccgcgtggcttgttatccgccagaatacccctgacgatatatccccattccggattggacaggattctgtcgatatactgttcggcggcacggctgtagccaatcaaaaggatatgcttctggttgtaccctttctttcgcatattccgtaaaccttcgcggataatattgcgcaccgtcacctcagaaaagacatttacgcagaaaaacacgaaaaacatcgttctggaaaaatcagactgcttcgttaaatacagaatcaggatatatgccatcaggccgatggtattggcctggatgatatgccaggcttcataacgcctgccctgtacccgcttcggcgtatataactggaaggcatagtacaggatcagatatcccggcacaataataagcagcgccttcatgtactcttgcaaagataagaaccaggggtccagttcaaagatgccgctcttgaacctgaggtaccacgccgcggtatatgagaatataattaccagcgcatctatcactacatgaagtctatttaacaatttctgattgtccttaatcacttttctccacccgattttcactagatattgtggccgcgcagatgccaattccacatccgctactggtcattacactttataatacaataattttccagaatcgacaacccgttgcagtacactttttcttaacatttctttaatatctctgaaacatttaccggtttccggaaagaatcttccatattcccggcgtatatctcgccataaagcggcttgtataatagcagaatatgacgaccacgacaggcagggccacaaagagaatcatgccgatatacatgctgtctcctgtcattttatggacgactttgttgccaaactgaatgatcatgaaatgcactgcatagatgtaaaaggtattccccatccagcctcttgcttgcggcagccggatcaggcatagcagataccagatcagcatggctccgctcaaataatacagcagggtccagtaaaggctcggatgctgctggagcatgataaaagataagacggcacagatgcaaagaactgccgcgatcgccttttgatgcagcccctcttcgatcgtctgcctccaatgtcttccgatataggctcctgccatatagataaacagccagtttgccatggcagacgccgtaccgttgtaagcatccaggcattgactggacgcagcaaagtataaggttatgattcccgccagtccggtccatctattccgaatgatcagataaatcaatggacatatgtagataaatacgatcagaaactgtagaaaccagaagaccggattatacttataaaacaagagggcctccagaatctcacgaagattaaaaggaatcgccttatttccgaatatgccgcttaacaccggaaccttcgtcaggacgtaatgtaaaaggaagtacagcagattccataccccaaaaggaatcacggtgctgaaaaaacggcttttccactttgcccccagtttgtccatcgtaaaattccggtagaacagatatccggagcaaaggaagaagcccgcgatagccagtctggcaaatttctccaccacaatgtattctattgtatttagcatttccacgcgctccagaaatatccccgagttctctgcatgaatcaaaatcaccaggatacacagtatgaagttataatatttgatacgattgctgaattcctgctccatatttactcctataaaaagacattcctttacaataccgtaagttaatatagcatatatcccgaaattttgctataataatgcagtaattgaaattaaggaatcggagtatgtatatgaaagtaacgatcgtaataccgaattataatggcaagcacttcatggaaccttgcctggcttctttggaaaggcagacatgccatgattttaagatacttgtggtagacaatgcctctaccgacgggagcctggaatatatgaaggagaattatccggatatcgaagtgatcgccttagataagaactatggcttcagcaaagcggtcaatgtcggcatccgccactcccggacgccctacgtcatcttgctgaacaatgatactaccgtagatcctcattatgttgaagaaatggtaggcgctattgaacgctcccccagaatcttctcggtcagcagcaagatgatccagatgtatcacccggatctcatcgacagcgccggagacctgtatacggtgatcggctggggtatctgccgcggaactggaaggcctgtgaccaattataccaaggccgatgagatatttaccgcctgcgccggcgcggcaatctaccgccgttcggcttttgaaaagatcggatattttgatgagagccattttgcctatctggaagatatcgatgtgggctaccgcgccaagatctatggctataaaaacatgtattgcccgaccgcgctggtctaccatgtgggaagcggaacaagcggctccaagtataattccttcaaggtaaaactgtccgcccgcaacagcgtgtatctgaattataagaacatgccgctgcttcagctgatcctgaatcttatcccgctggtattgggatatctggtaaaatatgcgttctttctgaaaaaaggttggggaaaggattataaagaaggcgtaacggaaggcctgaagacgatgaaggcccagaaaaaagttcccttccgcctgaagcacctgctcaattatctgatgattgaaattgaattaatcgtgcataccttttcctatgcgaaggattggcttacacggaaacttttgaaacgatgacaaaaacaccaccagactttaaatagtctgatggtgttctttcattttagaaatgaaacgtatctttcactcctacccaaagctggtccttatcgcttaagttcaaagccgtgccatcctccagatggtatccttctgcggaagcacttccctgatattcgcctactaactgcggccacttgattccaatctcaggatcgttccacgcaagtccgccttcatctcccggatggtagaaatccgtacacttatagcagaattctgcgatctcgcttaataccaggaatccatgggcaaagccctctggtatatagaactgctttttattctcttctgtcagttcgatgccgaaccattttccataagtctcgctattgcttcgcaggtcaaccgcgacatcgaataccgaaccttttatcgcccttaccagtttcccctggggaaactccttctggaagtgcagcccgcgaaggacccctttcgtggagcaggactggttatcctggacaaaattcatggtaagtcctgcctcttccatgtccctctgattataggtctccataaaatatcctctggaatccccgtgaacagcaggctcgatgacgcaaagtccttgaattccgcctacattcttctcaacttttatctgtcccatgtcaatcgatctccttaaaattcaatttctttcagatatctgttcaaggcatcctgccatgtaggaagcggagtaaacccgttttccggcaacttgctcttatccagcctgctgttaaatggccttgccgccttagaagcgccatattcctgcgttgtcactggaatgacgttcaccttgtcttccgaatattcctcatgtccaagttctactgcctgacggaagatctctttggtaaagtcataccagctgatatatccgccttcattggtagcatgataatatccatacttgtcagtctcaatcatatccaccagaagcctcgccaggtcaaaggtatatgtgggcgttccgatctgatcattgacaaccgtgatcttgtcatgcgtctttgcgatattcagcatcgtcttaatgaaattcttgccgttctttccaaatacccaggcaatccgcacgataaaatatttggacaatgtctctgatactgccagttccccggcaagtttcgtctcgccatatacattcagcggcttataatccttgcagtccggctgccaggcttcggttccctggccgtcgaatacatagtcggtactgagatataccatcttgcaatccagttctttgcagacctccgcgatattctttgttccagtcgcgttcaccgcatgcacgatctctttcttatcctcgtcttccgccaggtctacggcagtccatgccgcacaatgcactaccacatccggcgctgcgtctgtgagcaccttcctgaccgagtcttcatccgtgatgtccatctggacatacggcatgcttaccactgccgtcccgtcctggatcccgctgtaggtttccttgatatcggaacctactccttcatatccacgctttgccagttcgttcattacgtcgtggcccagctgtcctgctacgcctgtcactaaaaccttcattatttcatcccctctcggctgccatacatctcgtcataataattctgatattctccggagatgatcgtctcccaccattccttattatccagataccatttgatcgttttcttgattccatccgcaaacttcgtctccggaagccagcccaattcgctgtggatcttggtcgggtcgatggcataacgcatgtcatggcccttgcgatcctctacataagtaatcaggctctccggctttcctaattctttacagataatcttgacaatatcgatattcgtcatctcgttgtgtccgccgatattgtagacctcgcctacacggccattgtggatgatcaggtcgatcgccttgcagtgatcctctacatacagccagtcacggacattttcgccctttccgtataccggaagcggcttgtcattcagcgcattggcaatcatcagcggaatgagcttctccgggaaatgatatggtccatagttgttggaacatctgctgatcgtcaccggaagtccatacgtcctatgataagccagcactagcaagtctgctgccgccttggaagaactgtatgggctgctggtgtggatcggagtctcttctgtgaagaataagtccggccggtccagcggaagatcgccgtatacttcatctgtagaaacctgatgataacgcttgattccatattttctgcaggcatccatcagaactgcggtacccttgatattggtatccaggaagacctccggattctcgatggaacggtcaacatggctttctgccgcgaagttcacgatgatatccgggtgctcctcttcaaataatttgtagacagcctcacggtctgtgatgctctccttcacgaaacggaaattcgggttctccatcactggcgccagcgtcgacagattgcctgcataggtcaggcagtccaggcacacgatgcggtaatccgggtatttatccagcatgtgaaatataaagttgcttccaatgaatccggctccgccggttacaataatcgtcataatctctaatctccttttgtctcttttcattttgtctagtatagtccgtctacgaattttccgtccagtacgtccttcaagtactggccgtactgattcttcttaagcacttcgtacacatccaatacatccttttccgtgatccagccattcagataagcgatctcttccaggcatgcgatcttacggtgctgatgagattctaccgtcttaacaaagttggttgcttccaccaggctctcatgcgtcccggtatccagccaggtaaatccctgcccaagcagttccacattcagcttgccctcttccagatacacgcggttcagatcggtaatctccaactccccgcgggcgcttggcttcagattctttgcatattccacaaccttgttgtcatagaaatataatccggtcacacagtaattgctctttggcttctccggcttttcttctatggatttggcttttccctcatgatcgaattctacaattccgaagcgttccgggtcatccacataatagccgaatacggtcgctcctcttccggaatctgcgttctccacagcggctttcagacgcttctttaagccatggccggcaaaaatgttatctcccagaaccatcgctaccggctcgtcgccgataaactcttctccgatgataaaggcctgtgccagtccgtcaggacttggctgcacttcataggaaagattcactccaaactgccgcccgtctcccagcagttccttaaagcgaggcgtatcctggggcgtagagatgattaaaatgtcccggatgcctgcgttcataagtacggacatcggataatagatcattggcttgtcataaatcggcaataactgcttggatgtcaccatagtcagaggataaaggcgcgtgccggaacctcccgctaaaataattcctttcatgtggaacctccttagtatcttttataaaattagtattctctttcagtcgtatttcattagcataattgcattataaaaggtgacccaaggtcaccttcaagtactttttttcaatttcactaaatttgtctatttttcacaaataaatatccctgcatccttggtaatatggaagcctccgtccgtcttcttttttacgtaagaacggaattcattgtagtgatccagaatatactggctttgattgccatggcaggaaaggacataagagatcagcggttccggatcaggaacaaccagggaatcctgataagacatccactctaccttacaaaaatcctgtctaaggatattcccgccattttcgcggccaaacctctcatacaacttatccgcggacaacacgattctttcatcaaatccctgcacgagccggctgacttccatcatatgcctgcatccatatgtgctgcagacgaatcttccgtcccgtttgagcactcttttgacttctctggcaactttcgggatatcttcgcaataaaacagcacatgattggcaattaccagatcaaagtccccttcttcataagggatcctatggcagtcgaagacatggaattcaaatctcttatcctccgctccaatggcgcgccttgcatcccgcaacattccctctgaaatgtcagacagcacgatgtgaatatcttccggaaggactgaacgtctgtccttccaaagcgttccgtccccacatccaatttctaggatgcgcattcctggtcggatcttcaactgttcgtagatccatggaaaccatccctgctcattctgcgaatacaggctgtgaagattgatacgagcggagatattagatgcattctgatactggtttttcagactcttctccatgcctgtcaggtgaatcagattcagcatctggctccagtcaatcgtatgctctgcctggatcgcatcggcagtatcctgaatagccttctccaccagctgcatctgctctatccggtcctgaaccagttttaactggatattcagggagttcagcataaaatgatagtcggaatccgcaatcgtcatctcccgaatatcatccagggagaatcccagatatttcagcagcaggatctgctggagacgggcaaagtcctcatccgtataaaatcttgcccccgcatccgttacatacgagggctttagaatattctgtttgtcatagtagcgaattgtccgcagggttacgtgggccatgcgggcgaattcgccagaggaatagtagcctggttttttcattttatgtctcgcttttactcaaatgctgtcaggtagcctgggtactctgcatgaccggtggtgagggtttgtccttctacagttattttaatctgctcacagttataggcattaaggaaagtattgcatacgctgccaatggcaaaatactctccagttgagcccatgttagtaacaaaggtcgaaaatgcagggttgaagtctatctctacacttggcttattgtctaccgtaaccgtattaaatgcctgtatctggacatctgctgccactgcacctttggaaataagggcattcagtaccgcttctggagttagtgcatcaatttgaacttcttcggagacgaaagaggttgcatcatcattactaaaatatatagttattaattctgaatcctttgtatctttttcatcgtttacaatttcatcagtaacttcttcctctatattatcttgcctttcattgtttgcgggcttcttctcctgactttcattaaacttttctagttcattttctttttctacctgttttggcgatgatgaattattacctttattacaagcagttaaacacattacaaaaataatcaatataattcctaatattcttttcaatctcattgaaccaacctcatttattcatcctaatataaattatttgtaacgactcttcacatatttctacaattcgaactgatccttccactctttgatcttgtctaacggtattacaattttattaactccccacttttgatatattatatcttgcaaatcgctctttatcttatgctcttgcaaaactggtaagttcgtctcagatattataccctttgcattatcatcccctccaattattaaagaacgatgaccataattcaaatttcgaactgctatatgaaatcttgcacctatataatccatatcttttattaataatatcttatctaattcacttaacgaaggcggaattattgtataatcgtctaacttcatttctctcctaatgtattgataatcaaattgtttttgaatccaaatataaacctttttataattttcttttaaaatttttaacatgaacaaatcgttttctacattttcagggcgtcccgatattgtggtcaaaacgttttccgccttattaactggtattcttgcacaaaaatctggtgttaacttccacattgatggaaaacttgtatttattacgttttttatccccatactatgcagtatttcttttgtttgttcatcacaaaccgaatgataatatttagactgcagtataaatcgtaagaaacttttggtaaaatcactaaacgaagtctctgtatcaaaatgtgatataccagcacctaataaacatgtatttctataattccatatattattgggcaacagccattgtttagacttttctaatctagtgctaagtaaattatttccgcatagtattttaagaaaaccctctatatcttcgaatttctcatcattcactcgtataggtatatgtttttttctaacagttggaaacacttcttcacaaatattcgtacaataatccattataatctcatcttctacatcacttgtcgcaatcgcagaatccaaatataccatatcttctttactaatttcttttcttttaaatagtaatttacacctatcccattctatctgtttccttttaagcgtacagtcagtttcttctagtcgatcataataatggcatgtcttttcactccatttataaatgtccaacttaggatttattttaactggtttagaaagaaaatctcttaagaattttacataactgtcaaattccatttcatctacatatttttttgcttcctctattaatactttattcttttcattttgttcaactagtttttcggtgcactcaacaactttctctaaattaaatccatctattaatattcctctattattagaaagcattacttgtataccgcccgttccattaaaacccacgacaggaacttcgtttttcatggcttctaatacagttgaaggaaatggatcttctcttgacatcgcccaaaatgcatctgctcggcttagaagcgttttatatttggccgcctcctttatgaatggaataaactgtatttttctttgacttccgcttctctctaattgatttataatccaacactgcaattccttattattaaaattgccagtccaaatgaaatgtacatctttctccctatttctatctataaaaataagcgctgcatttacaaacaaatcaactccctttcttaactcgcatgttcctgaactcataatgactagatcatttaagttaattccatattcctcaagattaaagttcgcatcctcttccacattttccaaataaaccccttgcgccttaattaatgtatttccctttatctccggatatattttcctaaaatcattctctacatactgattgggaaatacaatataatctgcattttcagcaattttcctccccggctctacaaagccataaagttcaatacttgccctcatttcatgaattaacgaaattattttaaaattataatcttttaacaactccacataatgtccagatacaattgtattagttatcacagtcataaagccctgtcttctaagcattctaaaaagattttctaagaactctctttcatttaatccacattttttactattatttttaatattaatatattcaaattcttcattttgagtattgtctaagcaaatcaccggtatattccattttttatactgttcttctaaataaccattacctaatttccccgctaaaacaactacttctactttattctgcttcattttttttgcaatatgacatgccaaaataggcgcacccgttgctgataaatcatgtgtaacaattattaccttatctcgatgtctttcttgctctattctacgagccaaagaatcctcaattaagtaggattttggtatgggttcaatataaattccatccacaaaacacactcctgaaatttctactggatcaaaacgtatctcgttaattggaaagccaaaacgtatttctctaaccttctgattatctggttcaaataaaaatctgcaactttttgtttcagtaaaacagtcttctaagcctttataataaactgttgataaactttgtttgaaatctgcttgatagcagtttcccgttattcttatcccataaacagcattatcaaaccttatatatatctgtggatcattatcctcaaaaatccattttttaccctcaaccgataagcctttcgtcttaactatcttccctgtctttataattaatgtttcctttacttcttccattcttctccccccaacaattaatcattaagtatattagaattttctctttttatttctaaatttatcataatattctaacaaaatttacaaccttcgaattttagtacaatcccaaattaatatatgccaaatatagtctgctgcattatttaatatctattttatcattaatatctaagaaatgaaatagcatctacattaaaagtatacggtagaccatgagtaccagctcattttatgaccgccgtttccggcggtcggtttacacgtttgttgtttttgttttgcttatgcagatttccggcagctgctcagaccatggaagcagttcttccataaaacaataatccgtatcctcctgatggtctttcatcacggttaggatatattccagatagcggaagggatttagatgattcgcctttgctgtttccgtgatactgtagatgatcgcactggattgtgcaccgtcaatactgtcgatcagcttccatgcatgtttgtgcaggcagaagctgcgcagagccccttccgttgcgttattatcaagcgggacttcaccatcatccaggaatacttttaatgcctcttcctgattgatgcagtagttgatcccttccagagttttacccttggtaaggcgaccggagaactggatttcttttgcccacacaaagaaagcctccaccagaggtttgagattgatctgccgctgttttttacggtcatccggcttcagatcagcaagctggttgtccagatggtagatggcgccaatccgcttgattgcctcgtaagcgatcgtatctttggctgcctgatgatctttttttggcaatgccttcagggcatcggcaaaataccttctcgcatgggtccagcaccctgcgaaaacgatggtttcgctttcccggtccagcttccggtaggcggagtatccgtcacagacaacagtgcctgtaaatcctttcaggaattcccgcggatggtctgctttccgggtcttctggtattcatacaggataatggggggatcactatatccctttcccgtccggtagacccacatgtaactcttactgtttgccgggcgcccatccttcgataccttaaccggagtctcgtcggcctgcagcacatggaaatggtacatcctgttatgaaggtaatcataaagcggtcccagataccggtccgcacactggatcatccagttcgccattacctgccgggagatatggatgtcgtttctctggaactcctggctgatccggtataaaggcagtccattgacatacttggcattcatgatgcttgcacccagagacggtgtcagaatgctgttgcggagcaattcccttggtcggtccgctttgacaatcgtctgattatcttttcctgcatacacggccacatgatgttcttccaccgtgtagactgccggctgaacccggactcttttataaacttcatccgggagctgcttccatccaacggagccaaaaatttcctgcagctttgcttctggaatggtatgagggatcacttccacaggaagatccttaagatctgcctcgcgctttccttttttcttccggcgcgtgacctggatcacatcttcttccctaggttcgacaacataaagcgtctcagtcaaagcttccgcttcgttaaagatgagctccagttccaattgtccggcgataacgtccagcttttcggaagaacgcccataacgatgattgtttgcagatgcgatctgctcaatcaggcgttccatgtttgtattcagttgggtaagctggttctgcatggacaggatcactgccacgagtgtttccctgctgaaactgttcagttcttccggtgagtagatcttctgcatgttcggtgctcctttgttttactggaactattgtaccgcaaaccaaaagaaaaagcgaacgggataataaagaaggttcgtcattctcaccaaaggataaacactctgaaaagccgaaaaaactattagttttttcagtttttcagagtacttatccacacagcagcttatagctgtgaagtactcttgattgaatgaatgatatgagatctggctgtggataacttccgtcgcgtctgtggcaggagatacaaaaagattttttattttctccgttttgcacaacatttcactgttttttgcaagcactttttggagaaaaatgcaaaatatttttggagaatgttgcatctccaaattggagaaagttgcaaggcctcggctggcagctattctgccagctacatagccattgcagaccatatttagttgttatagcgtgagatatggaaacggaagttccgagttttcatcttcatgtgcatgttccctgaaatagcggaactcctcatccagctctttataatggataaaatcatttagatatctcagatcttcttctgcgcatcggtgatcttctatgagatcaagaagataatcattcatctcctcatagcgttcctgaaggttttgatattttttctgttctttgataacttttttatttttagccattgttacctgcctcctgactgctgattcttgaaagagttgcattgatgcttgattcacgtaaccgattattgatccccgggaacagaatcagttccacatggtgggtgagcctgccaatcagtgctgttgtcatccgttggtcataaagaacgttcacccactgtgagaattcaagattcgtgtttaaaatcaccgatttctgctcgtgtatctcagaaagataatcaaacagaagctgtgaaccggtgcggtcatacggaacatatccgaattcatccagaatcagtatccgggcactgttaagcttctttttcagtgcagtaagctttccgctgctctgactctcggaaaagagattgataagtccggcagtgcggtagaatcttaccggaatttcctgattacatgcagacattccaatcagaatggaaagcattgttttaccggttcctgttcctccatacatgatgacattttttcctgtatgataaaactccaggtctaacaggctttggaagctgacgtcttccgggaaatctatctcatctgccctgaattcctccacgcggtatctacgtgggaagccggcggtattgaggaacttgctcttcctttttgctgtacggtattcaatttcgtttgtcaggaggtttaaaaggtattcctgcggtgtgtctcctttctgctcgaaagcctgccctgcaaagttcgtggacagcttgagctgtttgcagcatgctgcaatggatttttctatatcagccatttgagacacctcccttcttaagggcggcatccagcattttcagatcatttctgaacggaatgaccttctgctgtggcagtaaaactttgttttcaagcggaggcagaagcggtacatctgcataggttcgcctgtaaaggctctgcagactgtccggatctgtggcattcagccggactgcttcgtcaactgttctgacagcactagcaaacccggttctttccgtaagttctgcaagcaccttcaggacacgtccgcgttccttgctttcgcagttatccatgtatatctgcatggtttgtggcatcatgtcatatatgccgctgtttcgaagagaacggggtttcctggcgatatatgtaaggtatggcagccagtccattctttcatgttcattgccgtaaaggcgcttatgacgcaccacttcgtgcatatctttgtccatgacaatcacatcagaggatgtaatcttgagatttacaatggactcacagaaagccggtgaagcagaataacggtgctttcctgcgtcaagagtaaactttccatatttatccgttgttgccgttgtgtaaagtgccgtatcaaacggaacggaaggaagcggcagtaaacgagccttatcttcttcaaacagtttactgataaagcggtcatcatcgtcatcatagtgctcacgctgcatatcgatttcacaacgatccagaagatgcttgttttctttcacaagatcatcaaagcggggtaccggtacaagttcgttgcggcgcaggtagccaaccttgttttccacgtttcctttttcccatccggattcaggattcataaaaaccggcttaatgcggtagtgttcacaaaagcgttgaaaccgctctgttacattacgcccgccacctttgatgatttcggtaacaatggttctggtattgtcaaaccagatttccgtgggaacaccaccgatgtgctcaaatatggcaaccagtccttccagaagacattccatgttttcgccataattaagctggaggaaacctccgttactgtagggaaaactgagcacaaggtacttagcctcgtgatgaagcctgtcattttcataaaaatcggctgttccaaagtctgactgggcttcgccgggatgatgattaagagggatatagccatcggttctttttagccgtagttcctctttcttctgtttgacgtataaggcaacaagccgataactgcagccgaaaccatctgcttcatccttgaggcgtttaaatactcttttggctgtatgccgttgctttcttggtgcaagcttgtctgcctgcagccattcatcaatcaaaggtttgaatgggtcaagcttggattcgtgaacctctgatgatgcaggtttgggagatggattgttaaagtcctccatatccacatattttttgaccgttttccagttaaggccggtctcagatgcgatttcagaaatgttcttatcttgccggtagaacatatctctgatatgatgtatctgatccattgtagttgacattctcctttcctccttgtctttattgtttggactacaataaagataaggttaatggtttttggatatacctgcaatggatcttttcatgggaatgctcatacttggtggctgccactcaagcgctacaccgttcctgagcgcttctagcgaatgccttgcaactttctccaatttggagatgcaacattctccaattcccgtttgcaactttcggtaattctattttacaataaacaatttcacagaagatcgctgggctgcacttcctggattgggtgtctggatacgatctccagtccctgcatcagtgcacggtattgctcctgggtgatctccagtgcttcttcttttgtgcggggccagctgaagccgccaagttccagtcttttgtaaaggagaaggaatccgtctccttcccatacgagccccttgatgcggccactgcgtcttccgcaaaacaggaagaggatatccttttcatatggatccagctggaagttaaatttcacaatagatgccagcccgtcgattccgcgccgcaaatccgtatagccggcagcaacgtaaaccttccggaagccggatgcgttattcagcatgaagaattcctcctacccgggagaacagttctgatgaggctgaattggaaatctccagaacaagattccctttccggatcgccagatctggacggaaaacaggtgatgcgtccggtgacacggcaggaagtttgatttcagcgaaagatacggactgctgaacagcagacaattgttttgtctctgtagctgcaggcaatgatggattctgagatgcttcataagcttcccggcgcaggatgcgctgccagtaaaaaaactgcttctcagaaatcccgtttgcccgacaccaggcggtttttgacatcccgctattcatacattcattcaggatcttggtccagcgctctgcacggacctgatgtgtgattttatccatggtactaactcctttaaaaaacttgtagttttctggagttattatctcatggagcgaggaaactagcacggtactcatggtctactgcaaacagccactttctgcggccagcagggccgcatttcccggccagtcagggccatattaaacggccagttttagaaatcggcagggcagagagggggctccgccctgctaatcagtatcgagccttgtcccagaaggctatgctttctcaatcagtacggtaaatcctgtagtcaacctgcgccggattccgtcaagcttgccgtagcattccttctcatcactcagctggttcccccattcatctggagaatactggcaggtgaagagggtggaggtcccaaggtcatcccgaagttttatgagatggtacaggatcttgatcccttcctcggaatatcggctgatagcgaagtcatcaatgaacagcagctgaatccgtgcatagtacctgatcctcttacggtacttgttcagatcttcctgccggttgagaacaatcagttcgtccagcagatcgctatagtctacaaacttacagcggtaattacgcctgcatgcttccacacaacaggcagacaggaaataggacttgccagcaccggtgactccatagatccccacattctgccggttctcagcgaagtggaatttcaggacctgttcaacagtggcatcattatagatgcgcccgttaccggtttttagattctccgccacggcccccttattgatcaggctgctgagccgcagattggtttcaaaccgcttattgagggtttctatgtattgaggctccaagacctcacgaaggaactgcaaagcggtatagctgccgaattcagggctttcagacagttctgcgaaacgctgggcggctaccggcagggatagtgtgtccaacatctcataaatatcggtagtctcattcttcatgaccggcctccgtttcctgacgcttcagcaggttcttaagggaatacttgctgtcgtcatctttgtaagtaccggatacggctattgcagcatcttcgttgggtttgctctgtgacgttgtactctgcgatggctccttatggtaagttgagattgtgttacagatataggaatagttgcatttcccagccaaaacggcgtctttacagcaacgttccagggcttccggcgagtacttttccgcataccgcagaatcccaaagcagcttcggaatgactgcaccggataagcgtatttccgaatgacggcatcgatcaatgcacgggtgctggggccgatagcagacgctttctgctggaaataaggcacagtccaatagccatagtctttgtattcggcgggcatatccgaagggatgatcacccagtctttcggtgtatagctgcgcttatgtgtccggatgaggtcaccctgtttattatagacataaatttctttttcgcctgcccggatctcaagttcctgtcgaagatatttccggggcatgctataatggaccttgtcgaaggtgaaggagaaatcttgtgtgtttattgtaaaatagaattaccgaaagttgcaaacgggaattggagaatgttgcatctccaaattggagaaagttgcaaggcattcgctagaagcgctcaggaacggtgtagcgcttgagtggcagccaccaagtatgagcattcccatgaaaagatccattgcaggtatatccaaaaaccattaaccttatctttattgtagtccaaacaataaagacaaggaggaaaggagaatgtcaactacaatggatcagatacatcatatcagagatatgttctaccggcaagataagaacatttctgaaatcgcatctgagaccggccttaactggaaaacggtcaaaaaatatgtggatatggaggactttaacaatccatctcccaaacctgcatcatcagaggttcacgaatccaagcttgacccattcaaacctttgattgatgaatggctgcaggcagacaagcttgcaccaagaaagcaacggcatacagccaaaagagtatttaaacgcctcaaggatgaagcagatggtttcggctgcagttatcggcttgttgccttatacgtcaaacagaagaaagaggaactacggctaaaaagaaccgatggctatatccctcttaatcatcatcccggcgaagcccagtcagactttggaacagccgatttttatgaaaatgacaggcttcatcacgaggctaagtaccttgtgctcagttttccctacagtaacggaggtttcctccagcttaattatggcgaaaacatggaatgtcttctggaaggactggttgccatatttgagcacatcggtggtgttcccacggaaatctggtttgacaataccagaaccattgttaccgaaatcatcaaaggtggcgggcgtaatgtaacagagcggtttcaacgcttttgtgaacactaccgcattaagccggtttttatgaatcctgaatccggatgggaaaaaggaaacgtggaaaacaaggttggctacctgcgccgcaacgaacttgtaccggtaccccgctttgatgatcttgtgaaagaaaacaagcatcttctggatcgttgtgaaatcgatatgcagcgtgagcactatgatgacgatgatgaccgctttatcagtaaactgtttgaagaagataaggctcgtttactgccgcttccttccgttccgtttgatacggcactttacacaacggcaacaacggataaatatggaaagtttactcttgacgcaggaaagcaccgttattctgcttcaccggctttctgtgagtccattgtaaatctcaagattacatcctctgatgtgattgtcatggacaaagatatgcacgaagtggtgcgtcataagcgcctttacggcaatgaacatgaaagaatggactggctgccataccttacatatatcgccaggaaaccccgttctcttcgaaacagcggcatatatgacatgatgccacaaaccatgcagatatacatggataactgcgaaagcaaggaacgcggacgtgtcctgaaggtgcttgcagaacttacggaaagaaccgggtttgctagtgctgtcagaacagttgacgaagcagtccggctgaatgccacagatccggacagtctgcagagcctttacaggcgaacctatgcagatgtaccgcttctgcctccgcttgaaaacaaagttttactgccacagcagaaggtcattccgttcagaaatgatctgaaaatgctggatgccgcccttaagaagggaggtgtctcaaatggctgatatagaaaaatccattgcagcatgctgcaaacagctcaagctgtccacgaactttgcagggcaggctttcgagcagaaaggagacacaccgcaggaataccttttaaacctcctgacaaacgaaattgaataccgtacagcaaaaaggaagagcaagttcctcaataccgccggcttcccacgtagataccgcgtggaggaattcagggcagatgagatagatttcccggaagacgtcagcttccaaagcctgttagacctggagttttatcatacaggaaaaaatgtcatcatgtatggaggaacaggaaccggtaaaacaatgctttccattctgattggaatgtctgcatgtaatcaggaaattccggtaagattctaccgcactgccggacttatcaatctcttttccgagagtcagagcagcggaaagcttactgcactgaaaaagaagcttaacagtgcccggatactgattctggatgaattcggatatgttccgtatgaccgcaccggttcacagcttctgtttgattatctttctgagatacacgagcagaaatcggtgattttaaacacgaatcttgaattctcacagtgggtgaacgttctttatgaccaacggatgacaacagcactgattggcaggctcacccaccatgtggaactgattctgttcccggggatcaataatcggttacgtgaatcaagcatcaatgcaactctttcaagaatcagcagtcaggaggcaggtaacaatggctaaaaataaaaaagttatcaaagaacagaaaaaatatcaaaaccttcaggaacgctatgaggagatgaatgattatcttcttgatctcatagaagatcaccgatgcgcagaagaagatctgagatatctaaatgattttatccattataaagagctggatgaggagttccgctatttcagggaacatgcacatgaagatgaaaactcggaacttccgtttccatatctcacgctataacaactaaatatggtctgcaatggctatgtagctggcagaatagctgccagccgaggccttgcaactttctccaatttggagatgcaacattctccaaaaatattttgcatttttctccaaaaagtgcttgcaaaaaacatcgtaaaacagtttaactgttttttcttcattataacttggaacaattacactgatactatccatattaatctctccatatcttgttaatacttattttatttattataagtcattccctcatcaaaagcaatccataacaatactccatgatttataacaaaattcgtttctataccaatgtataaaatcatttattataattcccccttcctaagattaggaagggggatctcttattggtcaatattagttctcttttttatcctctttctttttttcatccaatccgattcgctgcgctagttgcttaattctaatcgacattctggatatagcaattgtcaatataaaaataatggccaaagaaaaacaaaatccaaaaaagaacagcatgttaacaggattagctattcccactctcgctgctaaccaagttattaatcccggaaagcaatctaatattaaaatcccgcctcctactaataaccatgctaatgcatatctaagttccaatctcttttttctgatcatattaataattatgcccaaggctattataatcagtatcgctataataatttgtattttaatagtcataatctctcctaatattttctaattctttcaattagcaatgccagcgtaacttttaccatataataaactgattttctaaacgaaatagaagatttgccaccttctctttccttcattacaactggtatttcttttacattgtatcctcttcttaatatagcaactacagactctggctctgggtagtcccttggataatctttggcaaacagtgctattactcttttccctgccatccgaagtccagaagtcggatccgttatagttttccctgttaatagtctaataagcagagaaaaaaatttgattcctattcttctggttatagatgattgaaaaccttttttttctataaatctagaacctatgaccatatctaatcgatgatttagtaaatattcagccatagtttcaagaaactctggattatgttgtccatcgccatctacctgaacagcaacatcataattattttcatatgcatataagtatcctgtttgtaccgcaccgccaattccaagattaattggaagatttattatattatacctattttgttcacaaatttcttttgtacaatccactgaacaatcattaataattatataatcgaaccctttaacctctctttttattgattctatcgtattcactatattttgttcttcattatatgcagggattatgattaatcgtttcactcttatgtctcctaaactgcttacgcctttttcaatttacgcttttttcttttttatttcatcactaattaaacttcatccaaattatatccaggtgcttgtagagatagattaatattgtaatagtcatctttttcacagttccaattaagcaaatttatatcagatttacaagtatatgcacaaactttaggttcaaaaattattttttttcctaatccccttatcagtttacataatgctatttcattttccaaataaatataatccaataagttaaaaatcgaagttggcaacatcataaaatcttttgtaaccgcacacacttcttgccttaactcttcttgatgaaaataaccgtacctttctctaggaaatccgaaaaaagcatatttatccatgccaagtactattccagcatgatatatggtctcattattcttaaataatttagcaccaacagctcccacattatttctttgacaaactgccagcatagattctagccacttttcacttactatttttaccgaactatctatcagaacaatgtattccccatctatctttctttgtagcatttcatctaatctatttactactattatactgtaattgggatattgacaagtatttttaatagctttaatgcatttttgtaattgcttgcttttactgttattttttattacaacaataacaactttatcaaatgcaaccaatttatactgtgtatgataaaatccataatgcatagtacttttgactaccgccttctcctgacacctatacaaatgtgcctcaattgcctttttcccagatatataagcatacgctttactttctggatttgatgctgttgaatctttatgtgtcctccagtgatataaaggtattggcacgtgctctacactattagctgattcaatgcaacgaaatataaaatcatagtcctgggcgccatcaaattcttttctgaatcctttaacaatatttaaaattcttctactgactataaaaaaatgacatatataattattttgccttaataattctaagttgaaatcaggtttgaaatgaggatcaaaaaatcttgatccttcccaagacactttatcctcatctgtatatattacttctgatttgttaacattaattgccttaacaatctcaaataatgctacagattctaaaaaatcgtcatgatcaagtaatgctatatattcacctgtagacatttctatggctgcatttgtattatccgaaattccaccattaatttctaactttttaaactttatccttgcatcagttacataagaacttacgacattagcaactttatcgtcttcactcccatctgcaatgcataattcccaatttgaatatgtttgtctgcttactgactctatcatttccctcaaaaatttttctggggtatggtaagttggaacaataatactaactttaggcctataagaaaaaacactatttgctaacttatcatattctttttggtctaacttatgcttctctctccacttttcataatctattgatttctccggatattttctaaataatttaaaaagcattaattttagtccatattggctataaaacttaaacacctttcttaaaaaattcattttgtacctcacatgagtttaattacctaaatacaatgcaatgacttcatttttaatagtctcccaatttctttcttcagcagtttttattcccccttcataaagcttatctcttagcgtctcatcagagcacaattgattaatagcttctatggctttatcaatctcaccacaaggatataataaacaattataattatcaactaaatattcctcatttccaccattaggtacaacaacagcatatcctcctgtagccatcatttccaatggaggataggaaaaactctccaaataacttgtcttcaaaagtatatggcattgtctatatacttctggaacttcactataaggtatttgatgcaaaaacctatcaaccctataatacgttttgggattagaattataggacatataccatatttcaaatttatcaggatctaacttgtcaactattttgaaactttcatctacatttttatagtgaactccgcaatcaccttctatcaatattcttatctttctgttaaaatctcttttaaaatgctgaaactgctttttttcaattccattaggagcgtaggaggttggatgcccatattcttcttcaagccaatgtttacaccacttagatattgttatatattgaatgggaacgattggatgataactttgatttgccctaattcttaaaacttcaccaggcctgtagaaatctgtttcgtaattctgaaccagataaaatcttttttcaatattagcatattcttcaagaaattttactgttgtccacatcgtagcaacgactttatcaaatctcccttccagcatctgtaaattctgccctattactggtattctacgtccatcattttcataccattttgttttataatcaacattcaacaatataacatcctgccctgcctcttgtaacagtagagcatgttttaatgctaccattatgcctccacttatcttcattgatggcaatacaaaggcaatgtttggtgttgtatatttccgaataaaggcggcaagtggccttcctgtgtaaatcgttacacaatgctttttgcaataacagtacgcattattagctattctctctcgttgatccttattactaattaagtttattagcccctcttcccattccttttcagtttcacaaagaattcctgtttcattatgtgtaatcatatttttaaaggcccctacgttactggctatggtgggtacctttacaagagccgcttctacccatttattttctgatttggcttcattaaatatactattttcaattggtgccaaattaatatctatctctgaaatcaatttaggcaactctttccagtcaacaaatggatgtgctattatctgttcttttaaatctagcaattcagtaggtaaatctaaatcaccaactatatggagttgaacatttttatggttttccaatatgttccgtattgcaggaaggatcatcctaaaatcatcattatgagttaaacttccactaaaataacctattcgtatatattctgaagacttcttattttctattgcttcttcagataatttgcacattatttcagatgcagtattcctatttataaatacgtctgctacatagtgacttaattcctctgccaatctctgagtagtagttattgccgcatcacatagttttaatgttctgcccatgcgcattactccatcatcatagaggcgcctctcatctgaattcatggtatccagatattttattgtatttgtatactttgtatcaataactaaatcatcaatatcaaatagtacttttttatttaaagacttagctaatgatataaattctcccaccatttcagtatatggacatctaaaaaatacaaacgttctatagaatctaacttgatccaactgtaaattaacataatatatttcattgcttgaaatattattggcatctaattgttccctttgatgagttactcgatatcttgctggatgaggtacactttcatcacagccgtttataaatagaacatctttatatactttatatttagcgtcctttcctgcaattttgctagccttaataaaatttttagtttttcttgtaaaacttgttattccttcatctctcaaggttttaatagtcttactcgctaatactttaatacctgccataatgcctcctaatcatagccatctcagttcctttaaaattggatgataatatctatcaccttttttaatctcatcttgccacctattatagaaaatcttagacttcttttcctcaaaagatggtatttccatagaatcataatttatttttgcaaaacatgtccatacattccataatttattttgaattcctcttaatgaaaaatcaacttcttcatagccatccatatcttcagaaaatccccccatcattcttaacttctctgcggagatcatacagcagcccttccaagatgctgtaatatttcttacatatcgaaacattgcttcataaccttgctcgtcgtcagaaaatccctttcccaaaaattttataaatcccttctcatttgcatctaatgccaatcctgcataaccaatcaaattattaccaaataaaatctttggtgatactgtacatacatcgttcctctgtgcatacataagcatttcttctatccaatcatcattttctggtatacatgcaccatcaaataaaacataaaaatccgccttattgtgcgaaatatcacgatttaaagctatacccaaggtttcgttttcttttatttcaacaaatataatttcgtaattatcgtaacttgtgttattgtctattcgcggttttatttcatctatttgtaaattggagttattatgaactaatattataacttttggatgttgtaatatgtcgtaagaaattcgataaattgttctataaggcaaattactggacacactaccatgttcgttttctctaattaattgttctttgatagcacgaatagccgcatcgacagcataacttttggaatctagattcatcgaaacagaatctggatgaactctccaataatataaaactttaggtatatgaacaatgtttttagctctttcagtcagtcttaacaccatgtcatgatcttgacttccatcaaaattcgatctatataattcattagcattttctaataattcttttgaaaacactgtaaaatggcagatataattatgagatctaagttcatcctttccaaaagcagatttaaaattaaaatccgtagcatcgctaatttctttgctaaatttcacttcatctgaatatataaaatctgcttcagtcttttcaatgacgcacatcatctcaaaaagagcagattcatgcagcacatcatcatgatctaacagcccaaaaaaatcacctgaagctagtttcaaacattcatttgtattgttggagattcccagattctttttcagtttcatgtaaatgatccgattatctcgattcatccagtctttgcataccttttcaacatattcatgtttatcatcacttccatcggctaaacacaattcccagttcgtataggtctgcctttcaacagactctaacaattcaatcaagtattctactggagtattatacaacggggtaattatactaaactttcgacaattttgaaattcccattttctttgtctttctcgctcctcctcagaaattaaatgaatatttctagccttgtttttaaactctattattttctttttttccttttttttgctaacaattgttctgacaaattttgttggcccttgcttgagcaataatacaattgctttttgaattttaaacattaagattttcccttctatttaaacattcggtataggaatttaataaacacaataatatatatcacaaaaactcctaatattaaaaacgtttctatatcaaatctttttgtaacagtttttaatactaatgtattttccattttttcttcaccgatcacaagacttgtattcttctgtctaccgtcagtaaaacaaaaatctatatggttttccgaattctcattataagtctgcaattcgaatgtgtagttcttatttaaactattctgtatcgtatcaaatgaaaaattataaaatttactatctttgaaagtattcccctcgacctcgccattagcaacttcctttcctgcttcattatctactaacctaaatttaacctcaacattttccggattacctgtgagtttacacttaacttgtattccatccaaagttttctctaaactcttaaattcctgacttactgtctgatttaaataaaaagatgtagtcttatatgtgctggcatctattttcttatcatagatacaatgcgttttagatatatgtgcatatacaaaaataactattaatataatgatcatgccgattataaaacgaccctttttcttcatataaatacctctactctttatgattgactatattggttacatatttcttctgtttcaccaaacatctttaaatgcccatgctcaagccaagcaattttattacataaacttttaacctgatcaatgctatgtgatacaaataaaatggtagttcccttccccatcattaaacgtattctttcttcacatttttgctgaaatctgaaatctcctaccgacaaaacttcatctactataagaatatctggaattccaatagttgctattgcgaaagctaatcttgataccatacctgaagaaaagttttttacaggtacatccataaaattttccaactccgaaaatcctacaatgtcatcataatgtttctgcatttcctctctactataacccaaaagagctccatttaaaaaaacattttctcgtgctgtcaaatccatgtcaaagccggcccccaattcaattaaaggcgcaatcgttccctttacttcaaccatgccttttgtaggctttaacactcctgctattgtcttaagcatagtacttttaccactgccatttagaccaatcaatcctaacgcatctccctgcagtacttcaaatgaaatatctttcagagcccagaactcatcataggaaacttgtttttttatactctttataacatattctttaaaactatcaaatttttctgatgatagattaaatttcatagacacatgatctacctttatcattacctgcttatccatagtctaactcctctatatattcaatataaactcatcttgatttttataaaatattcttaatcctattagcaaagccaccccagcctcaataatcgctactaataatgatataggatttaaaatagagtcatttaacatcacatccctaaacataactaatatattagtaatcggattaattcttactattggttcaagccaatcaggtagaatagacataggataaataacgggagttaaatacatcaacgcggtagtaaacacagaatataaatgcatgatatctctaaacttaacggtaattgctgataaaatcaagcctattcctaagcaaaatactactaatagcatcagcggaattggaaccaatagtactgtccatgttaattctgcacgcatagctaccataaccagcagtaaagctgtaaaagatgcaagtaaatttataaaactcgaaaatattcgagaaagtacaaacaaatatttaggaacataaatcttttttattaatgaagaattatttataattgctgtcatggaattagtggtagaatcagaaaaaaaggtgaatacaacctgtccacttaataaatagagcggaaaattttctacgtcaaatttaaataaatttgaaaaaaccactgacagcactatcatcatacataatggatttaataaagtccataaaactcctaaaactgaacgtctatattttattttaatatctcttgccaccagttctttcaataatggttgaaattttaaaaaattttgtatatattgtgacatcttttcctccaataaatataaaatatttatttttctactaatacaggattataatatttgtcgacttccggcattctataatcctttaatatttttttatattcgttacttcgttcttcactaatcaatttcgaataattcaaattatattgtacaacagcaaagggattaataagattcctatattttcttcctactcgaatacagtaatcaatcatagaaagcagtcctagatcaatgttaaagttacctatctccttatatttttctcggcttattgcaaaacagtaccaattcattgcgttcacattccggtaccatcctgtagtcccaaatgctgttaatcttcccacctcatccttttgtccgccaaatagtgcttggggcttttcttgatttaacactattcccaatgaatttatcactttttgagaagttaatactttagggccaaccagcccgatctctggatgtttacaccataccgacaattcatggtatgtgttaagggctacagacggtgcttgggctatggaaaatatcagtatttctccttctgccacttctgcccctttgttataaccctctgcataatttgggctttcacaaattagttttttacatttcttttttatgctctctaatcttacgctatcagtagaaactactataatttctttcaattccactccaatactttctgtagcaaaccatataaaactattaagatcttgattccccccttcatcccatatgataaaagatatcttgccttttaaatcgttattccattctacatgaatttgcagatccttcggtctagaaaaactaaccttggcgttgtaattcattctattaaaatgattttgcaaacattttatttgtgcctcggcagcataatttttcgtatccatagatgatgccgtagaagttggagcagtcctccaatgatataatattttaggtattgcatatactttctcagttttttcggtaacctttaaaaacaagtcccaatcttgcgctccgtcagtcgaagaatcccatagacccacctgttctataattgatttttttaaaactgaaaaatgagtaatataatttcctgaatataataattccttagaccaaaaaggtttatagaatgccccaaatctcatggtggttttttcatcaaccttatcttgatctgaatagaggaactcaatatctctcttagcatttaatgccaaaaccacttcggctaatgcatttggagccaacaaatcgtcatgatcaaccattcctatatattcccctgccgcaagataaaaagcttcattagtattgtaagatatgccgccattcttctcaagtaaactataatgcactctcttatcatgtaaagcgtaatcttttaactttttgtttaattcgatattatctttactgccattagcaaaacaaacttcccatttatcatatatttgttctgtaattgaatagaataattcatccagcattcttaaatcagtattataaacaggaatcacaagacttatcaatggtttatactttacattttctaatttcttctgacagtttaaaaaatcatttttttctgattctgtatataattcccaatattttcgtttataactcacctcttccttttctaccgaatctttatttttatcttttttttttaattttaattgcaaactacataattttttaataattatattctcttcatagatttttagcctgtcccatctatcatcagcagcctctttataatcttcatacatacttttataattttctacttcttcttcgagttttttcatttgttcactaagttcatttagttctgcctgcttcaaatttaaatctcgcaaaacctcaagcagagtatgttctaatgaatttttatttgtatctaccataaattttctcctttactcctaataatactatagtctacacacataaaccagcagtttcatataaaaactgctggccttacactatctacataaaatatttaaggtttggacattcactctttttgtaatctccaatcatttatcatatatactaaactctaatatctttagcattatatcactcttactgtcgacatgcaagttttgaatacctcatcaatcagtattataaacaagtatgcgttaatatcaatgtatacatttgttgcattgtaattattccggcaaccgccattataatgaattgataattgtatactttaatcctattagtaattttatccgtttgaaacattaataaaagggcaaatagaaaaggaaggtaatatctaccttgtacacccgcaatttttaatttaccgacctctgtaaaactcaaatacattgccgtccaaatcagtgtaattgtaattgcaatactcccccagattatacatctatgtttccaattaattttttccaatccctccttttctttatatgaatcagttaatacaactcctcccaataacaacgcacacaatattggttgctgattcattccaaaatacgcaaagtggccaattgcatcggcgccaagcgtgtattttacaaatgtatctttaatattagttaataaaaccagcgcatatgacagaggtttatgcataattaacatcaactgtcgactcacgcttgtatcttctccacctctaacatcgcctgatacattcggcgaaattaatgtgggtaagacaaatgtagataataacactaagactccaatgagtataaatgttttaaacacatacatatttttctttgattcaaacttattcttaggcacgaaaaagccggttaaaagaaggggcgcatatactgctttaggcagacatccaattactatacaggcaaaaaacaaacattgcattttgatagtaaatttctcatctctttctaaaaattgtcttagtataattgccaatcccaaaataacaaaggccgtcactatagtatcataagtaaaaaccgtactaagaaacattggtgtcggaagcaaagcaaatatagacaacaaacgtttgcctcttggaacaagattaaccgcaagacctaaaacgaacgcataaatcaaaagattgctacctcgtgataaaagcatacatatataaaatggcaaacctgctatagagcataaattaaatatccctccctgtataatatatccagaactattcaattgaaaagaatattcatcgatcatctgagattgcattttattctttgcgtccaatatacgcatcatatctaatcgctcttccatagaatttacctgtataaactgaacgttatcatacaaatacgcgacactttccggaagtttttcacctatgtctgttactcctaatgaatatatattcttcatatgaatctgctcatcccaagagtagaagtaaggcggctgcaaactcaagagaattacaccaatcatcataatagcaaaagttgtagaaatggcaaggtgctgtgcaaactcctttttaaatacaaataaacttaataagaagaaactcccaattgtccagaaaaaaaacaaatatggattaggcttaaaagaattgtctactacgaattctgaaatttccacatccgattctatatcttcgaattgtattaccattttagaaattttattatttatatttacaactgatcgaggcatatctctcaataaattatctttaattttagtacattcttcttgaccatatatattttcttcataaacataaattatatttccattaaatccgtttgtaatatatgaatactgaaatttattaacatatgcatttatgtttatagtgatttttccactatgtcctgcaagcagtttatatctaccgtcatcttccacaaacccctttgccttgatattagatgtatcaacattttctttattaacattctcagttcttactaattttatgacggcatcaccaagacatatacatcctccaataaatattgatacaacaacgagtattagaacttttttaattacccttttcttttcctttaaccatctatccatctttttgcctagatatattatatatcccttaaccctttcatcttagtttttaactatcaaagttcattagatttttcactcatagaatatatttttgctaacctcttggctataaaatgtggccaaaattttctaaacattatgtaatcctcccttgttctttcattatttttaagtatatctgttgtctctgaaccactgtgtatacgatgtcccattaaaatctgagcatcatatataaattctccattcatatgagataatctttcccacgcctgccaatcctcatctgaacgaaatccaacttgaaaaggtggctttttcactttgtttttacaaattgtaacagaaggacaacaaatcggacagccaaacgccaatatcattcttcttactatttttcttttctgtaataatctaaatctcaaaggtaccaacattaaccttttcacagttaaaagtttattttttcttacttcttgtccttctcttatttccaaataatttgtaaaagtaataattggctcatttgcctcctttactttttctaaaacacgttccacaaagcggcaataatatatatcatcttgatgggttattgttacataatccgtattcgctacgctataagcaaaattccagtcctgtgttattcccccttgtgaattgtaataaaccggaagagaatatttatccgctatatgtctaataaattcattcggcgtagaagttatcattacaattttacttttaaccgtctgtttcaataatgattttatacattcttctaaaaaaggactttctttatatgcacatataacaaaagtatgattatcacccttcattttcttctcctactttacttatttaaatcttctctacttctcattttattaatatatatttaatagtgataagagaattgattaatataaacctctttttaatttaaatctatcacttttttgttataatttttccgactattaatctttctatctttactattctttaaatacccataatcgttgaccaaaataattaattaaaacaaatagtaccatgcctgccatcattgaaatattgtcttttatttttataggataactgcttaataagaaaaaaatcactttttgtgctaccccatatgctaataaatagcaaatacttatattgattacaaatttcaccattactaatttattttttttcttatactcaaatgtaaaatatctattcaaaaaataactaacaatacttcctataatataatttaacgcactcgaaaaccaataactcgccgaaaaaatattataggcaatgaacattactccagtccccactattgtatttactacacctaccattaaaaatttgattgtctttatatcaaaatatttattcaactcgctatcctctcatttgtttttacaaaccgttttatgtatgtaactcttttcaacataatatcgtagtttttcgttaacttccacataattcttaatgatttccccaatcactactaaaattataagttattaatttctgtcaggctttgagataaaatgaacttgtctaccattctaccatatagacaattatatacataatagtatatttactattcctaaatgccctatggctgatataggcttttataaataacatcacagttgaattataaatccatatcaattgttatattaacattagaaacttcttaaataatctaaatattttatacttctttattttctataattcttgtgtattaatataaccataacaaaatacattgtcagcaatagcattaatattacatataacatagatgcccccaaaattccccaattaacaacaaacaaattagaaattattattgagataactgccactatgcaatatccaattagcattactttttgtaagcgcattatcgttaaaacattcataaaatatcccgttattgcagcaaatccacctccaagcattaaaataaccagggcatctcggtatacattaatatttacgccataaatccatgataataaataaacaccaatgaaatatgccccaacaatacccagcactgtagctaatataataaatactacttgccgactaattatgtgtacaaattctttatttcttttttccacccaacagattgccattcttgttaataatggcctatatataaaaccactaagaagatttacaatgaatacaggcatgaaaagtatagcaaaataagcttgactttcttgggataagcagttatctatagcatattttggcgcattgcaaatataaaggtataaaaagccgcctaaaaagagcggaaagcattcattcaataacaatttggcttgaattaaagcgttttttatattaatcttaagaactttttttggctttactacttcatatgttagatatataaatacacatatggaagttagtgtttcccaaatacatgccactaataaattttctgttataactagtattatagcaaatacagcaaaagagattacatatctaattgacatacaaattgcaccaatatccagacgattatatctttgaaattctccatgaaatacgtcttctattacatcaatcgctttaaatatgccaaacacaaatattatcatcgctttttcgatattatattctttaataacaatataacttatgagaaatagcaacataaaaagacttgtaatatatctggataataaatattctctaaatttgtatttctgccttacatccgtagcctgataattgcgcatcccataatttccaattgttacaatctgatatcctagtgtagtagctatggaaaaaatacctgcatagacagtatcacaaacatgagtaacaacaaacaaaaaaactgcagactgtgcagaacccagaatgcttgaaaacatattccaaagcgcacttctcttgtctatattcttgttggtacacacaatccattttttcaacattatcaaaataacacaaccaactatatctttgttatgcttttcctctactaaatttttcttgtaaccttagcaatattgcaacaaaagttgaaaaaggataaatcattcttattctgtatgcaattacaaacaatttaaccgcaactctatgctgataaggtaatttatccaaacatcgcaactttataaaaggattcctattaatatcaggaaaatatttatgaataatataataacaatacttgcaaatttcttttctgatttgttgattacagtttttatacatattagttaccaatcccgtaagtatcttaactgtacaaaattctaacatatccaaaactattttatcgttagtattttcctttacttttttaatcgcactttcaattcccttatagggcaccttaggtctttttttccctttccgtacatttcccataacagaatcttgataaacacgataataatagccaattttattaattataacagtcctagatgataataaatctatcatcatacaatacgggccatcttctaactgctctccaacactaaatctaaacccatactttttaacaaaagatgtcttacaaagtctggcacagggagaatactgaaatacatgattgtatccaggcctaaactctacattccagtcttctgtatatcttttaagtgtgatttcacctgtatccgtatcaaacttctgataggcacatacagaaatatcagcatcttctttttctgaagcattatagagttcttccaaataccaatcagccactttatcgtcagcgtctataaatgctatgtattttcctctcacgtattcgagtgcattatttcttgctgcagattgaccttgattcttttgataaaagattcttattttatctggatttttatcacgatatccttcaacaatttcctgagtcctatcttgtgacccatcgttaattactattatttcaaaggactgcatagattgagacaagatagattctatggtttcactaatatatttttcagcattgtatgccggaatgataatagagatattaatagtactcattaatttatctctcctctcttattattgtatataccaaagtccaacctataaggaggatgattatgtcttttatccttcggcggtaattccatatagttaccatacctattttttaaatattcctcaatattgcttggaaacctgacttccagtcctgcatattgcatttttttagttggacatatatcggaaaccgaaataatactggtgtaaggagtaggatcaaaaaaataagccacattctttgttttatacttactatattttaagataatctttttagctcttttataaaagacattaggagttatatttaacatcatgaaaatattatgaattactttactaaccaaaagaataatctttttttcccatcctccgaaatataataccggttcatcgacagcacataagaccatcaactttccccaaaaccaagcacgcgctccttgtattcgcatttttattttattattagatatattatcgaaacagtatatatccagaaagattcccattttacatggtaattttctaaaacactcctccctaaattctgttcctttcagcattaatctcgtcgacatcaggggataattgcaatctgtttctgcatttagaatttcatacttatcccccattttcttctttgctatttttataaatctatcaaaatcctttcttaataacccaatatcaatatcatcatcccaaggaataaaaccgccatgcctaactgcacctatgcttgtccctccaacgccaaaataatctatattatattcttcacatagattacaaaaatcttttaatatctctaattccaattcttgtaaatgttttaaaacttctggagcataatctttataaatttctgccattttattctcctaatctttattttttaatatatcaagtgttagtcgaataccctcttcaagtgtatatttaggtttccaacccaatcttaataatttgcttgtatctaaagatgaatttgtaattttggtatatccacttttttcaattacattaggtaactctatgcgcaatccaacgttggcttgttcggcaatctttttcgcaaacgtaattattgttgtatatttttcatatccccctatattataagcctctccattctccccaaaaacaataacgtaaaaaatcgctagaatagcatccaaagcaaaacaatatgaccgtttttgcttcccgctacttttcattactatatcttcgttttttaatgctgctttaaaaaattgaatatccgctctggtattatcttcttgaaaaaaggggccgaaaatgtggccaggtcttacaattacagaattaacgttgtattcttttaaataggatacacataaggtttccgctaatctcttactttcggggtagcaagaccttacttttaaaggatttactatcccatacacatcttctattttcatgttatcactatctatatattcaccatatacttcggaagatgatataaaaaggactctttctactgagttttctttagcatattctaaaatatttatcattcctgttatatttgtctttatcgtttctaccggatataaaacatatgattcgggatgcgcattagacgctgcattaattataaaatcaaatcgatatttttttggcaacgcatcacatatatcttgaattaatacatgaacatatgtcaatttaattatatctccaaatcttttcttaactttatttgcatcgcgacataagatataaatatttatacctaattttctttctttttccaactcaattaaacaatcaactaaagttgacccaattaaacccgtagcaccagtaactaatatattttttcccctaaatttttcccatgggaaatttgttgataacacttttttaatctcttctttgtaaatagtactattccacattcatttttctcttttcgcctttaaaatttagttacaaccaccacttcaagtggtggtttagccttagccctccaaagggctattgttactgctcgccccgaagggcggtatcgcaagcacttttactggtccgctataaagcggcacctcttgaatcttcttttcttgaatcctctgcttgctctttaatatacttctgtactgcttcgtctgtaatattaccaattgtttctacgtaataccctcttgcccaaaatgccttatcccacttactttgtaattcgggatgcctatcatatagcattaatgtactttttcctttcaaatatcccatgaaatctgatatactgattttaggtggaatcgctacacttaaatgtacatgatcatcgcatactgctcctgctactatttccacatttttatagcggcataagatgctaagtatttctcgtacatcaactttcaatttcccatataacactttcttgcgatacttaggtataaaaactacatggtactggcatttccatcttgtgtgtgataaacttttattgtccataaggaccacctcctatgtttgagtttggcttgcgataccattctcattgtatcataggaggttttttattgatatcatacacgcttctgcttactccattctccccagcatagctgggggattaggattttcatttaatccattcatcattatttgcacttaacaatgccttgaaaatttcaatatcttcaactgttgtaattttcaaattcttttcagatcctaaagaaaaatatgattttataccaaatttttcaaaaagggagcaggatgctgcagtatttgaaatccctatttgttttgcatccttatgaacattcaaaatatctttcaatttataagtatgaggcgtctgcgtccttaacaaattctctcttggtatagatgtattagatgcttcccttccttcactaataaatacaacttctgtacatggtattgccgcaacagcacatccatgctcttggtatgttactaaactatccgtaataatatcctgagaaaccagtggacgattgccatcatgtatcataacaacatcctgttcatcataatatttttctatttcttttaacccattgtatatagactcttggcccgtacttcctccctctacaacatgttttaattttgtaatattaaactgtttagcatacgcccataatacttccgtccacccttttaaaataaccacttcaatcacatcaatattcggatgtttctgaaatgcttctaaagtataaataataattggcttattattcacatgtataaactgtttaggtaaatcttgatgtgtccttgtgccgcttcctgcagcagttaaaagtgcaatattcataacaacctccatactattaacatattgttgagtataccattatttatatattttttcaatcacaaccaccgctcccctctgtttttcactccttacttgcaaaggtaatttttacttgattctataaccccaaaataaaatcgatccatctaatatggatcgattttatcatattataaactttttaatttttgaattccactcattatattatatccataacgttctgatgtggcccatccattcccctgaggattttctttctgccccaaccactgtacgtatggagcacagtttcgctttacgagatgaaatctaggatcaacacaagaatttgttagtgcccctgaagagccatatgctttcaaatgttgtatttgtgctctaattcccgttcgtacatctggaaatgtagcacaatttccagtagaattaccatccaaggcaccaatgcctgcaaaattaaattgttcaatttttacaattccaccatattttagccaacccgtttctagcatagtttgcgcaaatgcaacctctgccctcactccttcggcatttgcctcttcaagatacaatttgcaaaacgactccagtgtaggtgctcctccctttcctaattcgtttccaggataatttacaccactcgatttatagtatttcatcatttggtccactgttgttgttgttgttcccatgatggtatataactcaggggctttaacaagttgtgtcgttgtccccgccaatgtcataattccattaccagtagtaatatacgcatgtatttggtatattcctgaatgcaagttatggtacataggatctacagtaatcttatatgtaccatcattttgctttactgctttataccatttaatatcgctctggttactactacaccaaaccggaacttcaattttatttattccagaaggcgaaactatattattcaatataacatcaaaactacctagggaagcatcatagttagcaacatacaaattcaatgatggaattgtaatctcaaattttgctgttcctacatacttcaatgtaccatttgataaagttatgtaagcatctccttcatactcccctgttgttctatgcctgctgatcggcacggtcgccctgtatgccccggacgagtccctgctcgcctggtaccacaccagatcatcctggcctcccttcaggctccacacggcaaactccaccttcctcacgtccccgtaaagacccaggttcgtcgccttcagctcgtaattcgtctccgttcctgccgcatccgtcgctgtgacctccgatttcggcgcctctatctccgtcgatgtcgtattggcgcacagactgatgccattcccgcctgtcaaataggtatgcacattgtaggtgccagtctcaaatccatgattcgctatgctaacagccacctcataacttccatcaggcctctttgcagcatcataccatttcaggtcgttctgcccgttcgccgctccccagactgccacctgcagcctattcactcccgatggcgattccggcttggccagactcacggtgaaggtgcctccgtccacatccttttctgacacctctacctttgagatgcctggctccgtcaccttgaaagatgccttgcccacatacttcaatcccccatttccaagggttatgtatgcgtccgcctcgtactcccctgccgttctatgcctgctgatcggcacggtcgccctgtatgccccggacgagtccctgctcgcctggtaccacgccagatcatcctggcctcccttcaggctccacacggcaaactccaccttcctcacgtccccgtaaagacccaggttcgtcgccttcagttcgtaattcgtctccgttcctgccgcatccttcgctgtgacctctgatttcggcgcctctatctccgtcgatgtcgtattggcgcacagactgatgccattcccgcctgtcaaataggtatgcacattgtaggtgccagtctcaaatccatgattcgctatgctaacagccacctcataacttccatcaggcctctttgcagcatcataccatttcaggtcgttctgcccgttcgccgctccccagactgccacctgcagcctattcactcccgatggcgattccggcttggccagactcacggtgaaggtgcctccgtccacatccttttctgacacctctacctttgagatgcctggctccgtcaccttgaaagatgccttgcccacatacttcaatcccccatttccaagggttatgtatgcgtccgcctcgtactcccctgccgttctatgcctgctgatcggcacggtcgccctgtatgccccggacgagtccctgctcgcctggtaccacgccagatcatcctggcctcccttcaggctccacacggcaaactccaccttcctcacgtccccgtaaagacccaggttcgtcgccttcagctcgtaattcgtctccgttcctgccgcatccttcgctgtgacctctgatttcggcgcctctatctccgtcgatgtcgtattggcgcacagactgatgccattcccgcctgtcaaataggtatgcacattgtaggtgccagtctcaaatccatgattcgctatgctaacagccacctcataacttccatcaggcctctttgcagcatcataccatttcaggtcgttctgcccgttcgccgctccccagactgccacctgcagcctattcactcccgatggcgattccggcttggccagactcacggtgaaggtgcctccgtccacatccttttctgacacctctacctttgagatgcctggctccgtcaccttgaaagatgccttgcccacatacttcaatcccccatttccaagggttatgtatgcgtccgcctcgtactcccctgccgttctatgcctgctgatcggcacggtcgccctgtatgccccggacgagtccctgctcgcctggtaccacaccagatcatcctggcctcccttcaggctccacacggcaaactccaccttcctcacgtccccgtaaagacccaggttcgtcgcctttaactcgtaattcgtctccgttcctgccgcatccgtcgctgtgacctccgatttcggcgcctctatctccgtcgatgtcgtattggcgcacagactgatgccattcccgcctgtcaaataggtatgcacattgtaggtgccagtctcaaatccatgattcgctatgctaacagccacctcataacttccatcaggcctctttgcagcatcataccatttcaggtcgttctgcccgttcgccgctccccagactgccacctgcagcctattcactcccgatggcgattccggcttggccagactcacggtgaaggtgcctccgtccacatccttttctgacacctctacctttgagatgcctggctccgtcaccttgaaagatgccttgcccacatacttcaatcccccatttccaagggttatgtatgcgtccgcctcgtactcccctgccgttctatgcctgctgatcggcacggtcgccctgtatgccccggacgagtccctgctcgcctggtaccacgccagatcatcctggcctcccttcaggctccacacggcaaactccaccttcctcacgtccccgtaaaggcccaggttcgtcgccttcagctcgtaattcgtctccgttcctgccgcatccttcgctgtgacctccgatttcggcgctattacagcaaatgtggttgcttgcccgaaacttttatttccaaatgcatccgttaaatacgcatgtatattatactcaccactattatatttatgattcgctatattaacatcaacgctatatgttccatccgcctgttttattgctgtataccacttaatatcgctttgattactcgaacaccatataggaacatcaaccttatttatccccacatctgtattatttagtctaattattactctaaaacttccctcattttgattataatctttaacttttaactccccaacattggctttttgtacctcaaacgatgtgttaccaaaattaaaaaagtagccatcttccatttctaaataagcatgcacagaatagttgccataggtcttatggttatttaaatcaatcgtagccagccatgtgtcattccctacatcttttcccatataccattttaaatcattttgtccaccttcattactccaaactgcaaattgaacggatttgactcccgtaggcatattagaaaaaacaactttagattgatattgggccggattagttccgtttttttcaacagaaatgttagcactggttttactcatcaccgcactagttcttcctaattgttccattgtcccatttctatatgtaacgtaaagatccgcaatataagttcctacttgatcattatgattacttatcgctacatcaactgtatagctcccatcattttgtaaagtagccgtataccattttaaatcatcttgtccatccgtttgacaccacaccggtacctctacttttgttgtattagtagatgaacccacccctgttatctttactttaaaagtaccagaaaaatcattcttattaactatccttatctccggattcttggataaaccaaaataattagcaattcctattgcatctgcaatacctaattgttttaaaaaactttcttgtttcaattttgcggcatcactcggattagaaataaaagcatgttcaacaataataccgggaaatccatttgttttactatccttaataacactataataatctgctaaagacccatctggatactttgtgccgttttcagaatttcttatctttattcctcgattagttagtcctaatcccactaattcttttaaaatctcgtttgctaaatctttcccttgagcatgaatattagcgttataactactattaggataccaaacctctactccattagcgcctgcacttgccgaattaatgtgaatacttacaaacacatcagctccccaccgctttgccatctgaactctttcagataatccaacatctgaatcattatttcttgtcatatatacttttagtccactatactcttctaattcttgtttacaatattgtgctatttttaatgtaagattcttttctactaacccgttggctgcagctccgccatcacttcctccatggccaggatctaatacaaccactttctcttttactgcagttcttgaagtcttcaaattccttgacttatcattaaccgactcaccactactctctgcaatagcctcttgcgttgcatctaatgcctcttcaatatcagtctgagctgcaattactttattagcatctacatctacaaccgaaacatctatatcatttgaatttatatccccattttcatatccaggatagaattcatttactccaaatttggcctcaataccaattgcttttaaatcaattatttgttctattccatttataaaataagcaaaactatctagttcgtatgtgccagaatcttttttttctaaaggtattgtaaatagatacaattctttttcttgccttgttaaatttagttctaaatcgctgccatcatttttcttacaaactaatcttacctttgatatattctcattcccatttccaaaagaaacaacgacattctgctcattcggtgtttctagaaaaggcttatcaacactcacataatttataagtacttgtgtttcatcatttgtctgtatttcaatattttgactatcttgttctggtatctcttctgttacattatctgcctcttcgttagaagcattatattgttcattttccactttttgttgtacgcttgaattgtcagtttgttcattatctgcctcttgttgattttcaattattgtatttgactcgttattgccttctgtactatttaaagaatcataatccgaagcattaacattctccaacgacattgttgagcaaagcataactattataagtatatacgcaagtctattttttaactttctccccattctatttatcctttctaccatttctctacgttccaatcttcgataggaatttaactttctaaataattaagcattttttaatattttcctgaattaataagattcttaatggcctgtacgaccatcgccttgtcttctttatatgttacgccaaaccactcgtcatttgattgaagtacttttacttccacttcatcatctattaacaatttacctataattataggtaacaaaaattctgcttttaaatcgtcttcctgtagtcctttaagaaaatctctaaatccatactctagtattccaaatatctctggtgtaaaaccccacatattcatggatacttctgcttccatatctatttcttcttcaatgttttcagttctaactatagccttgtttccttttttcataatattatgtgtttccacaatttcagtaagcattcccattccatcaactctacaaattccacgtgttactcctccgttttcgcttaaagtattttttaaaacaaatccgaccatgcaaacggaaattctgttttttgagaaattgtcgctgttcattaaatatttaaatgctttaatatatgcctccttgccataataatcatctgcattaataacaaggaatggctcttgcacaacatctttacagcaaagaattgcctgtcctgttccccaaggtttttttctatggggaaacttgtattgatatttcttaggaatatcttcaacctgttgaaaaacatattctacaggaatttgtttctgaactctatttcctattttctctttaaagtctttttctaaatcctttctaattacgaataccactttatcaaaacctgcacttatagcatcctttattgaataatctacaataagttcaccatttggtcccactggttctaattgttttattccttctccaaaacggctgcctattcctgctgccataacaactaatgtcgctctactcatattgctctcctttaactttcatttagtcatatcaaaaaataatactaaaattgtaacataatttttttttactgtcgagatatgcattaattataatcctattactttaaacactatttaattaatatcaaaagtatcttcacttaaaataaattgctttccatcctcatcaattatatacgcatgaatataatatttgccagttttataacccaaagccgatacgtcaatatctacgtgataatttccatcttcttttagttccatttgtttccatttcaaatcactttgatcctttttagcccagacagctatgtttgcaacttttatatttttattcacatttgatatattaaataattttactggtattgtactagattcactttgatattctcccacctgaatatctgctattggtatgccatctccctttatatgtaaatcttctttattttcatctaactcagctaatttttccataagtttagatttcttattaagttcagattttattatgtctatatctaatctttctgttaaagtttgcttgtttgaaaaaagatttgttcctaatcctaatctatcaccttcaattttaatacctaatgcagccaaagtcgttggaaaattatcaaaagttgtatattttctctgtgtcttattttttagttctgttgccgaattaatataagttgtatatactctcctcacataatcatcattaattttcacacagaaatccttgtccatggtaggatgatcccccaccaatacaatcgttgtatttttataaaattcttgttgttgaatccactctaaaagttcatttatctgactactagagcatgccattacattagcatattgattatcttcaaataaatttggacacttttcacaagggtaaccatcttcaaaatgagtatccactgttagtaaagtcaagttaaatggattctcctggtcagctaattctaataattctttctttgcaaagtcaaacaatttttggtcttcatatccccaccacaccttataattatccggaattaagtccaaatctaaaacataattataatcaaaaattttataattaccatgattggtaaaataaagttctcttccgccgaatgttgcatccgaaccaatcattaaggtttgattatagcctccacgttccagtatatcgcctaatactattgcatttgggaaaaaggcatcttgggtatccatactatttgcatctatcgatatgttaagaggtatacctgacgtattagcaaacattgcccccatcgtccatgtagttcctggcattgcaatgcctccctctagtttatcatcctctcctgaaaaatcttcattttcctgcgctaacttagttaactcgggtataacatttctctcaaaagccccaccattgtctttatctgcataagttatctccatggactctaaaaaaatatatatcagattccttttctctccgggaaatgtaatttcaacatctgcaggattcacataataatcatctataaacgttgaatatgtaccttgggctttaacataatttccagcatctagttcatcccacgcattatagacaaaaaatgttgcggttaaaaaagaaagaacaagttctatacccataattacaaaatattttttctgcttccgatatgcaataaaaagtataacaacaaatataagcactaatacagttggaacaatacaaaaatcaagatattctttaatcattccttcgttagtaccttccaacggcgctgtaatatgatatactaattcatccatagtaagattactccatgtatcaaacatccatttaatgctaaagcatataaccgtcgtcaaaaccattaaactaatagttaatactgttcctattatgcaaccaatcttttttaatacaagtttataatctttcatatttacttaatactcctacattttttatttcttcatcttatcaataaaataatcttaatcactactcaaaataatctaaccatacaactcctttttattaaacctagaagtattatactgaacattatctaaaccttactatcattttgaatgcaaaaaccaatataatccatttcactaaacataatattgaaatattataaaaagtcatatcatattgtttcttcacttacttttatattttttatctttatattacattgcgttgtccgagaggttattagtagaaattatcaaatagaatctagaaagtcacctaatttttcactaaattcatttcccaattcccctgacatatggccttcataatctaagtatctatagatactcttattaaaattgttaagttcaataaaattaaaatcataataggaaacatgatactttaccatcatttccttgtaatattcatgtgctttttcaaaagttcggggatacagttctaatgtttcctgtggaaccggcgttgtaattacaactaattcaattcctttttctttacagaaatccactaattttaaaaaatattctttttcaacttctaatatctgttcttgattccataaaataatatttgaacttcctttatctgattcgggatctgattcttgatacatataaccttcctcactataccgctgtacattcgaatttagaggtgatacttcataatttttatatgactcgcttaatttcaatttcaccgtattttcaaactctgatatcttgttcctataataaaaccaaggcgctaatgcaaccctggcatccatacttttaattttctggttgaaatattctattttaacttctgagagtggaaactccttataaatatatactgaatttgccccatcattctgttttgtagaccagtaggatggatctaattcataaataattcttttgggtttatgaaacctgcacgcttcttttaccaaaaaataagaatctattatatgctcatcgggcatgcagatattcgtgcttttccttcccgtttcctgatctacaatttccggattaatagcgctaaggccatgcgacgtgcctacaaagatatcatcataattctgtgtcgtaatcctatgaacatttactctggcaatattatactgtagcaatccaaaattcaataatcctgttaatacacaacatacaactataaatcccaaagtttttataatcttatatctccacatgattctcccctttattacattttcatggtaaccttatctataagtttaatctttttttcaaaacatatatgcctgttataaacattcaaccaaatcaaacctcttaatttcttgacgtttctcttattatacccatggttttaaatgaattcaacaattctgtgtagtttatttaacccaaggaaaactgatattcccaattcaccattaatccgtaccaaatcctcattcacttaagcaaaataaaacaccatctataaacgaatcttacatatccttcgtttataaatagtgttttaacattactttattatcaattgagcaaactgttttttgcttccagcagcaatactgatgcatcagcattttgagtgcttattgtagcctttgcatttgccaagttgccatattcctgcacacttctcttacatcataaaatgcttcatcaaaatcatttagatagtttgaaacttctaaaattaaagtttaaattctgtatccacattatttagtctaggttggaacaataacccgataagtcattcacaaattaagcgcggtgattcttttcttgcataatattaaaaataaagaaccattcataaccgccattttataacctacgtttataaatagtcctccatttataaccaaaccctacatattctaatacattctttttcaatttaatatcgaataatacataattttgtcgaatttcttctatttttttccatttattaagatttatgtttacaatatctcaatctaatactttttaggaggagattttatggataaaatcaaacaattaattttacgtctcggcatacgttctacttacaaaggattcctttatcttgcctatgctctcactctttgtatacaagatgaaagttatcttttatctatatatactcgtttatacgctgatgtaggaaaacattacaacgttagtaaagataacgttgagcactgtctgcgtacagtcgtatctacatgctgggataaaggagaccgaaaatttttaatcaaaatatccggctataatatgactcaaaaaccaacaaacggtgaatttattgacatattataccattatttaacacttcacgaaaatatatctttataatttataatacaactgtaatggtggaacgatgcgcatcttccttgtatagtgctatcgttccatctttagtttttcttcatttttaagaattaatacattttttaaaattcccactaaaatggagtaaaaaccaaaacctcctaaaaatcctgttatcaaacgcctaaaatttgttgattctttaatccgactctcctgaagcccccaatcacttcccataaccgccaaacataaaaatgctttcttaaacgatatatctttaaatattcctataatcaaagccacactttgaccaataaacactccagtgcatcttgcacacactggaaattgcttgcctttataaaaaaaacttcgttctggcatttgatgacaaccggaatgatttccgatcattctaatcgtttctaaaactgattgccgcaatcctgacatacatttatcaccttagtttccgaagtcgtcttgctttttccttttcccatgccacacaagccacataaaaagccaaatggtcctgcaatcaaagttcctaagcatgccttaatccagccgaatcctttcgtcttcccctcagttgtttgttccgtaacagcatggcttgctacgttattgcttccgcattttggacaaatcatttttcttcctctctttcccctatgtatttaacgtttaattattcattttcttcatcattataagcaaatatactctattagtcaatataaatatactctattagcatttttatatttactttttatagacaatcctattttttatgatttaaaaacttttgtaaacatctaaatatatagccaaatcacggattacactgaaaacctgaattaaatagaaaattagccgctcctaaaacattacaatccacaaagattgttagtggtatcggatacgattacgctattttatctacattaggagatataaaaacaatgtttggcaatgatacacttacgactaatgatatatcagttagtgcaatgaatggaaactggaattatcgccaaatacgtgttgcagggacggcgtggcaagaaaatacccttcttatattctttgccagcaatcttaaccagaaccaacaggtatatataaacattatgctctcagtaagttgacctatatctcgactttggggatgtcattaagaggaaataaatccgatgttatataggcgccggatgctacataactttgattttcattatggtttccatcactaacgaaattagtattgcccgcaggccctatgctcacataaaaagatcctgtaatggtcgctccaattatccgatcgcccggcaaagttatatcaattgctgggcgatatccctccggtatctttccttgattgctgtaactatgtcctgctattacacctgaaagcactttattatgtttaaatgtaacaatatttccatttctgataagtgtccagccattaacagatgaattttgggcgttttgatctaaaaacactaattttctaattaattcagtatccctccttgaaacttgttattatttacgtctataaaagcgtacaacaaaaacacccgatccccgccggatgtaaaaatgcccttattcccctcttgctatgcgcttaaatacttctgatgatgatacttgacgccttcctggtccaccgtgcagtagcccatcgtcgtctccggcttcgcatggcccgccatgaccatggcctcctgcagcggcatcccccggttcagggcgttggtcagggacgtcctgcggaaccggtgcgggtgggccttctcgacccccgcccgctggcccgtccgccggatgatgtcctcgatccccgtctttgacagtcggctatgcggcctcctgatggatacaaacagcgccgggctcccatccgtccggctgtccagatactccttcatgtacaggttcgtcctgtcgttcaggtagacacgcctctccttgctccccttcccgaatacgatcaggtccttgctggtgaagcggatgtcgtcgcggttcagggtcaccagttccgagaccctcaccgccgtgctgtagaagaactccatcatcgccttgtcccggagcgtgctgcagttccgcagcagcatctccctctcctcgtccgtgtagggcttgcggatcttctgctccaccttgatcgcctccaccagggccatgggattcctccggatccggtccctgtcccgcagccatgcgaagaagctgctgtagaccgcccggacgttcttgagcgtctggttggacacctggcggatcgccttgtaggcccgcatgtacccggagatgtccccctccgtaatgtcccggactgccttgttcacataggacagcagcctctgcagctcgtaacggtacctatccaccgtcccgggggactttccctccagggccttcgacatcaggtattcctccaggtctatggcccagctcctgtcgggaaccctcagttcccgcttctcctgcgagatctcgcacccctcgaacaccacctgaaggaccgtcttaaggtctctcaggcatgcctcgtccagaatggcctgcatcctccgcagcacctccataatcttctgctccatcattccaactcctttttgctttccattgtagcaaataatgcgggctattcctgaactaaatagaaaattagaaagtagttttaaaagcattgagatattggcacacgctgtaacaagcggtacatttccaatcaaagatatcacacagtttaaaacaatgtatctagcatttttttattctggcacctactttcttaccgaactcaacccacatattatgctgtttaatgattcttttatcggtaaaaatcttgaatttgggagagtaggaacaaatacaggttatagtattggtggaagcgtacggtttgcatctactacatcgtttgttatgggtaactggactgtaaatggctggacgtttagcagttggatgctgataggaatcaaataaactatagattaatttccgatagcaatccaatccacggtatattgtgtgcttccaatatcaccattaggtgattggacacttataataaaaccactcgttgtaactttatatgttccaacagttatccaaggatcacgggactcgcttccttttctaaccgagcctattacaataggtggattagaaaatgcctttttaaatactatatcctgcattcgtatatatccgtttgcatttggtggcgttgccattccacattcaattctatatggtaattttctatttaattcaccaacttcatccttcaccttccccaaattcggcagcacttcaaacagcggttccaccgcttccacattcagtccattcagtttcacccgatacagcggatactgcctgagcgtctctccttcatacacatttcctgcggtataatccgggtcttttgccacatctcctggtactccctggatataatggagtttcatgttctcaatggctccatttgcttcaatctgcgcaactaccagatcattccgcaactgattctgcgtgccattattaatcgtaatgtcctcatattccccaaacggaatgcgtccgactgctcctcctactaccagtgctccgtcatatatacgaagcaggttattggagatcaaagttgcttttaacttctgtcctacatttacgactccatccataccgataactgcttcccatatggctctgtcgtctgctgcgttaatgtgtgcttccgcctgaggcggcgtttcaattgtaattccttttaatcccatattattcaccaaccttatattctatagttttattgttaacatcgagtttcaatattttgcctgttacaggctgtttcatgtacaatccggtgattctctcgcggccgcccacgatatctccgactgccacttcgatatcctggattgtcatacttaattccttatagtttcctgcatctttcagtttttccgtaccgtcttcaatcatctttgcccggtcggattggcttgttgcctcatacactgccgccctttcgtctgctccgaagaaggactgcttttcgctgacatttccttcttcatccgcatacagatggactgtgattaatttttcttccttatccttaccatagcagaccagatgattggtccccatctgataatcccgtgtggtaaaatgcactttattgtcattgctatattctatattttctgaataatccacgatgggcaccgcccggatcactacgcatccggaaaacttctgctgttcatagacaagttccagttttgctcctgcggacttcagcatcccggtcaatccttccaggccatctacgtagccatccatctcatagccttgtatctggatgccgctgtcaacatcatctacctgcatcaggccgtcaaaccatccttctgtcaggactgccagaatttcattggcttctccggatatggttagtttttcctgcccattttccgggcaaatgattttctgctgcagcaggcctctccaggtgtagcctcttaagaatacggagtcttcataagtcgaggtctctttatcttcgatcaggcctccgtattcggtgcctggcaggtagatccgatcccccagctgatatcctagattcatatattcggaaagcgccatctggagttcaaaatcattggtatctcccagatcaatgtccaactgtgcagattccgtcagaaatcctttttcctgccctctgctgttggcaataatcatatcttttatgcacatcttggctggctcctttcctggaacaggataatgtcaaatccaaaatccccgttccattttacccggctcatgccctgtggaattctggcaaagatattctgttctttctctctgctgttaaatgcattttccctgctgccgtctgtcttcgtaagtatgattgttccctgggaactatctattgtcacgtactctcctgcctcgatcttcatattcacctgatataactggtctcctatgaaaaccgctgggcttatggcaggtccgaatatcaccatgcggaaatccgtttccgtataatgttcatttagtattgtcatatctgacagaccgttagagtagcggtatggataacgcagtggatatctcttgttatcccttgacatggtatctgtcggctcataatgcatctctttttcctctatccaataaggatagtccgtggtcaccgcaagttctgtcaccgcaagcacatccgactcccactccgtctttttggactcagtaatgtaacattttagatactgctggttgaagtacagctttcctggcacgccggccagtatgtctttctcaaatatctctgtcaccaagtccagtgctctgtgatattccgcttttgacgcaaatatctcaaaggtaacacttttctcatggatctccttttcaaacccggtaatctggtttgctgttgacagggcgttccacttataatccagcagatctcccgccagcaaatgatagggcccgctctttagatccaccacctcgccaaaatgattcttataatacacattcatcatactgtcactggcactcctttctttaatgctctgtttacctgacgtccattcaggaatacaggcctgtctgttctttcattgttgatctttctctgccggcgttcgaactcatcaaagtcgaatccctgcattgcgctgccgccggacaggatggaattctgataggagattcctcctccaaaggtggacatagccacgcttgcctggccttccagcgtctttagagcctgccccagtcctttcttcatctctcccaaaggaacattggattcaaatccgattcccatgcccagtgccatcatttttcctacttcgtcacggaaaacgcgggatggggaatggatgccaagtttatctttgacccagttcagagcatcttctgccgcttttgacgccgcatctgccagcatcttcgctgctttgccaatgccattttttataccttcgatgatgtcgtgtcctaccgctccccagtcaacgctgctgaaggaagatttaattgaatcaataatctgcggtatcgcgtcaataatcttcggtattgcctctaccaggccaagcgccagctggccgatcagttctatacctgtcaggattatctgaggtatcatcgtcaataatcccgtcagcaggctctgaattatgcccggagccattgcaatcaatattggtattgcgttaatcagtccttgcgccaatcccataagtaaagttaggcccgaactgatcaactgcgggatattatcaagcagtccttggatcaatgttagtatcaatgtaatcgctgtcggtaccagcatagggagttgtgccgcaattccttcaatcagcccggatagtatactgaatcctcctgccaaaagtgctggaagattggctgttatagccaacatcagactattaagaagtagtgctccttcttccatcaatgcgggtaatgcttccacaattccattgcacagattggtaataatctcagggccttttgtcatcatcatctccagcaatccatctatctcatcaccatatgcctggtgcaacaggcctaaaccagcgacaaccagtccgatacctgcgcctatccccatgaatttgagaaatcctagtccgaaactagctgcctttttaagtacgtcatcaaaggattctccaaccattgacccccatgtacccatataggatccgaattctcctaatttccctgaagcagtctggaacttttctccgatttttgtccctacttctcctgccttttctccaatttttgctcctacttctcctaccttttcccctgctttttttaaaggctcggaaagtacgtctttcagcttcccaccagtttcagaccatacgtccttcatttttccggatatttccttcattttattgaccacttcttctgtgggaagtttagataatagattttttcccatatcactgaactttgtcatgattgtggaaacactgtcggaaataggtcctactaattttgctcccgtcttagaccatatttcgccgattttcccggacatttcttttaatttttccatgattttttcggttggtatcttttcaatcaattttttcccaagttctccaacctttgtcacaatctttgtcacggtgcctcctacgaaagatataatcttttctcccatagatagggctgtagagacgatttttttagccaaatttgccaatttaggaatcatatcctcgatcggaataatcagtgccgaagcaaaatttgaaaaactctcttttaaaggacctatcttgcttccaatacccgaaaaaatttccggcacttttgacattccctgccctaattttccaactgtttccactgcctttccgatgccgcctgtcaccagccctaccgcgcctttaacactatcatacgctgtgattacctctagaatattcggcattacgcctgccatgtctgaactgagcgtatcaaatgatactccggtttttgacaatgactctgccaattgggcaaatatggtatttgcgtttgttacaatctttcccatattatccactatgccggtaatgtcatctaacgctttgtttgtcttttcttctgccatgttatcatcctttcttgattaacacggctcactggctcacatatgtcttcttctaattttttattctgatttctacctctcttccgcacttcttgcatcggatatacactccgctgcactgtgcggtgttgtcatatatcaatagtttctgcccgcattcttgattggggcagcggtaccatttccgcacaaccggaatcttcagcaccttttcaatctgctttgtcatgagaataattctcctatctcataatcggatacgttgccctgttttctgtggagcgcgacccgtttcttgatttcttttacccgctttctttcttccttgtctttaatcgaattcagatctgctttgcggtacatcattctttgcttgatctccgcctgctccggcaggccttcgaatagaatcaggaatttccaccagtgcatgtacctcacccgttcaaggtcaatgccatagtactccaggaaagcagcgaagatgcagccggcatcttcggtgtatgaaaacaccggctcgctttcgctttttgaggaatcagtcttctttggctcagggtaaagcacattgcctgccaggaactctcctagtttatatattgcttcttccgtatcttccggacagtcgatataccactgcaataagagttctgccttctttctgccgggaactccctcgtcatccagaagttctaccagtttgatccattcccggaaatctgtcacaatgcggcaccgcttgcctctgacttccacatagtcaggaaacctttcatataaagggttcataggaatcacctgttatgatgctgccctttctggccgccttgcctctgctgcgtattacggttcgcatttacataatatttgctatagttttgatccatccgtctgccttcctgttctccaaacctggaaaatgattctgctgactggatcgccagttccaggctgactcttccttcatacatcttttcactggtttccgggccaaatatatggtcaaagaactgggcaaaacagtctacctgcgcgcggataatgtcgcttttctttcccacctttggggtttccttgctctggatgaccaactgctcctgggcttcctccagggcgtccatgaagtccgcatctgtaaagtcaatctcttgttcaaatgttccgaatttccacaaactcatctaactgattcctctctttctcttaggcttctgccgggatctcaccctctacgaatgtgcatgtctgccatttatctgtcgttgtgcagtatccttttacgatttcagatacagccttaaagtttccgctgtagatcagggcatccgtgccgtctcctgtcgtatcaggaactacgctgtatgtacgctttctggccggatatttgcctcctgccttttcctcgaatacatccacgcttacgatctctacctgcgcgtctacacccagaagctcgtcgtctgtaatattggcgatcttttcatgtactgcattgttggtatagcggtcaaatgcatactcgattccggtagcataaccgactacgtcagtcctctccgttgcctcatcgatatactggcgtgcgtattcctttgcctctttgccctcgatcaatgaggtgaatccggtaatcctgtcataagttccttctgttcctaccttcataaaggccagtctcttgtgtcttcctactaatttctgattgtttgtcataattctctctccttctacttttaaaatatttttgctgtctttcggctgtccgccatttttacatacgcctatctgttgtcaagatagaccatcctgcattccatcagatacttcacgtatccggcttccctggaatccaggtatccgctttttaccgtgtcgattctgaccggcgtgactccttccatttccggaaggcttccatccaggctctgcttctcgagccattcctccagatactggcagttcccgatgccgtcaaccgtacggcttgcgtcttctgtatccaacgctttcatagttacggtaaaccagtactgtttcagtacctttccatccgcatacttcttataaactggctctccttttgccgtattaacggaatagccttctccatcgggaagataatccttatggataacgcttccgctaaacaccggacaggtcgtcagatattcccgtatgctttccaaaatcgtcttttcctgcgccaactcaccacctccgtatcatgctttttacttttggcaatattgctaattgactctccagttacataatgctatattgtttttatcgaacatcagttctgatcaggtgatgggtcatatcttgtaaacagccatcggaagttgtactttttaaacagggtcttgtggatcttatatgcatcctcataatagaatccctttttggtagaaccgttcacgatgctgctgaccgtctgatattgacagtccagaagttttcccatctgcagaaatgtaactttttctgttttcattgcctcaagcagattttgataaaccagcattttttactcctttccaagattattcaaattcgtaattccgaatttgttaacctgattatattctttatttcgtattatgtcaatacgataaattttgatttccgtatttattcggttttccgaattttatcatttacaaaatatgttcaagagtatataatgaatctatataccttggaaagagtataaaatgaggtggaattatggataaagcaagaatcctggaacagttgatcaaggaacagggctataatctgaagtctttcgctgccaagtgtggcatgccctatacaaccttatatggaatcattaagaacggcgtaggacgcgccagcgtcaacaatgtcaacctaatatgccggaatctgggaatcgagatgaaagacttggaggcaatggcaaagggtacccctgtcaaagaatacgagcctacttatgaagatgtggaacatctgatcgcaaggaatggaaaggaattttccacagaacagaagatgcgcctgatcaaactgctgtccgaaattgattcataaaggactggttttattggctgatacaaagattatcgccgcaactttagaagtgtttcaggagtgcaaagtgcgctcttttccggtggactgctgcagtctgctcaggcactatggatataaggtatacacctataaggaattaaaaatgaaaaataatgaattgtatgagatgtgcatgggctattccgacgatgcatttcaagatggatgcaccggcatcattgcctacaatcaggacaagcctgccggaagaagccgtttttccttgatgcatgaactgggccaccatgtctttgcacatgtagggaattcttcccggaatgagcgggaagccaatgcctttgccagcaatcttctggctccgcgcattgcaattcactacgcccattgccattctgcttccgatgtggcacatatttttgaactttcctacgaggccgcttccaatgcatttgccgactatcagaaatggcacgcaagggttgcccgctattccatgaccacgctggaccagcagatgtaccagcacttttaccattcatccgcaagacggttcgtctggaatatccgtagatgcccctcctgcggcagaatactatacaatcgtcaggaatgcggatgccagttgactgctttaccagaatatattcctgctttcggaacggaagatgcctgggacagagatagcgatcggcagtttaaaggagccttgaaccgctggctgtatggggaatagaaaacggcttttccacactttgaattgtggaaaagccgtttgttttataatccatatttctgatacatcgaagcccggtatgactcgtcttcactgacccttcttatatcctctaaacgattctcattaagtagcctatggattaattctgaaagacgtaactcacctattctctcacccctcctttcacctattctctcacttttttgttctctttttttggcttcttcctctaattcttcggcaaataactcctttaatgcatcgcacaacatatctctcgcctccttcatcgccttctggtttgcccggactaccagatccattaccgcctggtatagtttcgaatccttatgcgctttatagtccctaatcagccggtctgtctcctgatctgcccttatatccgtcctgaggctattaagccatctgttctcatcactggaaagttcatggtttaatataatctgaatcggcaggaactcattttccagccaatagattccattctcgacctttcttatggcaatcttccgctcctcttctaagattcttagcatctcccttggatagtggctgcacacaaaggttatggtaatctcctccatccgaatatctccaactttctccgtatctgactgataaaaacaagcgtatccgtaaactttataaaagtcgttgatgctcagataatcccccggacttttatattcaatcaggttatgcttccgaaaaattctcccaatattcttgcgtaccggggaatcggtcattttctttacaatcaatgtgtctatacgcatcggcttcttgcttaattcgtactccggatagaactccagattcccggattcttcctgtaattcaatctgcaatgctgcgcagaatcccggatgccattgtaaaaccttatctgtcatctggtacctccattatatttaattttatcttctcttgcaaggttattggtcggattcattcataggcatcaccacatttctgtctgaattacaaatcggataatcctgacgaacgtcagataggattatatagatattttagaaataagatttgtgagattactgtagcatatttctctaatataggcaatcctttttcctggtatgcctgacaagcctggtgaatatgaccagcagaacatttcaacatatcagcaaagtttacaacattttgtagcatcaaaaagagcaggttttaagcacctgctccttgcaaatattcgaaatctaaaactgcgcatagatgaatccgcccgtggtggtcatcacatacccaaacatgggaatcccgaacaccagcatcccatacacggcccaccgaatcaccaaaggcttccttcccagactttcccggatctgaattcccctctcctttaagaagctgatcaggaataccaccaggcagcccatcgccaggatcatataatccagtttgtccagtcccagcatcatcagagagccgtccgtaagcgtggcaaggctgaaccctgtcaccgtgctcttcatcatggcaaatgcggccgacaggctgacagccatgtcaaagtaccagctgatattcaccagcaggaaggtccgaaggatctgtacgacatgccaggccccggacttgggattgatatggaacttctcgaaacctttgcggtaaagtggggccagcaggctgctgatcgcgatgatcaggccgttatacaggccataggcaatgtatttccatgcggcgccgtgccagatgccaacgaccagaaagacgataatattagcaacgcagatgggaaccacccgcccggtcttcttgccaaaggcctttttggaccatttgccgaacttgcccatccatttagacagagacaccggataaaagatatagtccttcatccaggtccccagcgtaatgtgccagcgatgccagaagtctgtgatggacgttgcaaagtaaggccgcttaaagttctgatccagttctacgccaaagagcgcggcaacacccatgactacatccatgccgccggaaaagtccatatacagctggatggaatacatcaggacggcaacgatattcgtcacgccggaatactgggtataattctggaatacctgatttaccaccactgctgcccggtctgccagcaccagtttcttgaagaatccccataacatcagttgaagcgcgtactgggccttcaacagatcaaaggaatgctgttcatacagctgcctggccagcctgtcgaatctgccgatgggcccctgcagcagctgggggaaaaaagatacaaacaaggcaaatcggaacggattcttctcggcttcgtattttccccagtatacgtcgatgatatatcccatggactggaatgtatagaacgagattccaagcggcaggatcaacttctggaacgagattcctgcatggaatatagcgtttacattctcaatcgcaaagttggtatattttaagaccgccagcatgccgaagttcagcagcaggcacccgatcaggattctccgctttctcgacttcgcctcattcctgggcagttctttgtggttcacccgatctaagagtcttcccgtcccgtaagtggtgatggtggtatagagcaggaagaacagaatcttgattcccgatgatgcatagtagatataactgaagatcagcagccatatccactggaatcttttcggaatcagatagtaaccgattaccgcgattcccacaaatatcaggaattccattgatataagggacatgtttctcctccgctatttaggcttcctgaagacgctgtaccatatcccacagcgcctgtgccgagttaaaattctcaggcacgatatccacaggcgtgatctcgatgtcaaatgcttcttccaattctcccacaatagacaggatcgcaaatgagtccagcacttcgtcatcaatcaatgtggtacaggtctcatagtctgcatccggctggatgtcatttaagatttccaataatttttccatattctttctctcctattttatcgtttccttttagttttctttttttgtctctttctcagacagatattttcccagctctgcgctgaatttttctgcctcttcgccatacatatggccgtcataatcccagtagccttccatgctccgatcgatgttcagtccatcgtcaaaattaaagttcttgtacgggacttgatatttcttggtcagggctttaaaatatgcatccgactgccggaagctatccggcatattcgctatcgtgtccgcagggaccggcagagtaatcacttccagctcgattccctcttccttgcagaatctaaccatttttctgaaatacgcaagcgctgccggacgtatctgtccttcatcccaagggacattattgaaagttcccttatccgccccttcggctttgtcctgatagaggaatcctctgtccgcataatggccgccaggcacgtccaggatcttcgggtcatgcgactgatatgcggagctaagcttcttcttagccgtctctttggcctgcatcaggttattcttatagtaactccagggaaagagcgttcccctgaattccagttccatgatcttatttacaaagtattctgccttatttagcgaccatgggaactccttataaaagaaaatggacgtagagccaagtctctggtccagaatccagtaagatggatccagttcatagatgattttctccggcttatgctttctgcaggcttccttcatcagataataagtatccaccggatactcgtctgccatgcacaggttgaaactcttctttcctgtcacctcgtcgactttcccggggctgatcccatactgtccatgggaggtgccgatgaatagataatcaaaaggcccttcctctttcactttgtgcagattcatccacaccacgttaggcggcatggtaatccagttcaggcatccggacagtaccgcgcagatagccaggaacaggatgatccttataattttacatctttttttacttttcatgtctattgttctgcctctatacaattgatctcgtccgtacttcggcgtcttcttgccactttgatgccttcgctttttgaatagaacaggacctgcggcagatccctgctcaggaacagatacatgccttccgtcacagaataggcccccgtacgctcaaataccagtatatctccaatcttcgcctgctgcaagggcagattcttcacaatcacgtcattgacggtacacagcgagccgcatacgttccactccgttacatccttttgactaaaatcctcctgcttaatgcctttttgctctttgtccacagatacttcttcatatctgccctcttcctcgtgatactggcgataatgaggacgcttcattgccatagcctgtccaaaataggtcaggtgatggatgcctccatccacgatacagtacttctgtcccatattttccttctgatccacgatggcggtcaggtagcagccgcaataagcagccagataccggcccatttccaaagtaatctttccctggaatcgaagttctgaaagaaatcctgcaaactccttcagcatggcttcatcatcagcctcttcgtctgtagaaaaatacggcacatagaatccgggaccatactccaattcttctgcttcgtatccataggattctttcagcattgttatcaattcatccagatgctccagttccttcttaatttttgccagtttctttttctgggttccggaataatgctgcaagcctatgatatttacatgggaatactcgtttcgccgctctatgatccgacagatctctgcctcatccatcccgaactggttgccgctggtcacgcggatcagggcccggatacggatgccttccttgcaggcgcattgttccagaagttccagatgactggcagactctatggtataggttcccttatccctataattacacataacatgggcaatgtccttctcctccttatatacgccggagagcacgatccgttccataggaatctggcaagtctcgcatatgccaaactcccccggagagcagacttcatatttgtcaaccacgtcctttaaaggctttaccagaaacggattggccttcatggcatagcagaggcttgcctttcctccaagaatttcccggatcatggcgattctttttttcaactcatcgatatggaatacataggacggcgtctcatattttccggcaatctgccttaatatatctctatccatgcaatccctccttatactgcgttttcagccctttacggtcgatcttcccattatttgtaatcggaagccgatccatctttatgaatacattcggcaccatgaatgccggcaaagctgtccccaggcttttgacaatctggcgcttttccagttctccttcatagaatgccacgattttgttcttctcttcatcatagatgcagcacccgcgcctcattccttccacccgctccaaggcagtctcgatctctcccagttcgatcctgtggcccatgtgcttaatctggtagtctttcctggatgcaaaatacagatacccgtcttccccatagtagcccagatctcccgtccggtagattggctccagatactgcccattcagaggattctgcataaacgcagccttcgtctgcctgggatcattatagtaccccagcgagagcgccgtgccggatacgcagatctcccctttcttggaaggctctgtaaccagacggtcttcctcatccagaagaaacaccttctcattgggaaacggctggccgatcggcaggttctcgcctggctgaaactcccggtcaatcttataatacgtacagttgcaggtaatctccgtaggaccgtaaacgttggcatacctggcatccggcaggtaccgcctccactcgttcagatgctttacgggcattacctcgccggagaagattaccttgtctaccttggagggcaccttgtactcgaaccctttcagcgtcgtaatgatacacagcgcggagacggcccagatcaaggtagtcacttcccgttccaccagatagtccagcagtttcgtgggaaacgaaaagagtttcttgggaatgatctgcatggcagcgcctgtctttagggtggaatagatatcctttaccgatacgtcaaaatcaaatggcgcctgatttccgatcacatctctgtcggtaattccaaagatctgcgtaaaatcttccataaagtcaatgactgaccggtggcttaccaccacgccttttggaatgcctgtagaaccggaagtgaagttggcataaagcgggtcgatgtcaagcctctggcttctgatttgctccaaaagtacgggggcttcttgcgtctttaatgcctcttctatatctatgaccactccttcaaagcccaagccatccaactgctttttatactttaaatcagccaccaataccctggcctttagtgtgtccaggatctgcctcagccgttgggacggcagtttcggatccaggagcacataaaaacagccaccatataccgcgcccataaaggaatagatcgcatttacgctcttctccatcaatacgggaaccggcatcctggggcttaccttctgtgcaagacaggttcccacggcccttgccctcatcttaagttccgcataggtgcaagatgccccttcatccgcaaaagctgtcttgtcaggatacctgctttcagatcgttccagatactctaatatatttcgaatcatattttccccctgattatataacattcttgatatgctatctagtttatacgatactggagaaaatgtctattacatccataaaatcttaataattatccggcggaaaaggccttattcattggcctttttcctataacttctgtaattatagagttccagtttttctttcagttccctgcccaaacgctgcgcgtaagtacagaatatgttttcttcaaaataaagaatccggtttctggtatctactttccggaccagatccagattcgccagcgtagatgattttgtctgaaaaaaatagggcgcgaccttctcatacaaaggctttacatccgcatggatcttgcctgtgccttctttatggacgaccttgcaatagtgggaggatttaatggtttcaaaatagtagatatctttcagcgatactttcatccataaataatcctcgctcataatatacatgtgcttgtactcttccgttgctgctcactcctttagctgccctacactaagaaaccttattagtataccatatataaaatactatacatctccctaaaacaggtcgacttttcatattatgtaaaattttgtcgcattttgtagtatgaaaacatcataataggcggcctatgcatatgcacaggccgccttccgacagtcttccctattcgcccaatccgctctcaatggcttccaccattgcctttaacgccgcttcttcatcttccccttcacataccagttcgatctcgtcgccctttttgatacaggcgccaagcacgcttagaacgctcttcgcgtttgcagccgtattgtcatactcgaacgtcaccttgcatttaaaactgctggctatattgcaaaatattccagcaggcctaagatgtagtccggtggggttaataattgtaactttctgcctaaccataatctcctccgtttatccttcttgctatactattcaccagcaggagcattggaatccgcttcttccaaaaccacctctacgctgacttcatttaccagggagcacccatccggaagttccacggttaccggtacccgataagtcccaggcgtcgtataatccttcaagtctatgctcaccttctttgctatggagaacacatccagaaccgcgctgggacctttgatctgtatctccagatctactgtgctgtcataacttatctgcagctcatcggcaaggttgttgaccatgatggaactggtcgagacttcaaatatcctcgctcccggctgctcgatcgaaatggataccaccacattgctggcattctcatctgccagggtgactccttctggcagataggatgagatatctaccgtcttttccgtcctctgggtcagttcggataccttaagcgcctccgccgggacatcaatctcggtcagtcccgccagatccttcttctccccggatacccggacttcctgaggctcaacggtaattccgcttactttatagccttccgctgcagttacctgggaagtatccagtttaacaggtatgctcttgatctgataaagagttacttctacgctgacgccatccttgcccagattattcgccagcagcgtctggtcaatcacattattattcgcgtcatacagtacaagttttgcctcaagggtcgaattctcggataatcctgagacatctacttcagccactaccttattgatgctgttgatcaccttcttaggtcctcttaaggtaaccttctccggattcgccgtcatctctcctaccatatatccttccctcaccgtaccggtggtagtcggagtgatagggaaattattctttgcctcatcatcgatctgtacttgcagattccgcggcgtcgagtaggccttttcatatttgtagcccggtatcgtcacttcaatgggaacctgggttcccaaagtcagttccttcatatctgcaactgccctaatatcatctgccttgatattattgagaacagaacgtttggcagttacggtaacgcttacttcctgggtattgtctataatctggtaggttctgttgttgtccgttacaatctcttcattcattaccgtgacaggaatgccggaaaaggtcttatccgtcaccggattgtcgatattaaccacgataagccacataaaagcggcaatcagaaaggctaatatcttaagaccaagattatccattagtctttttttcatgattatgccttcctttccataatgccgctattttattgacttccgtctttttatcctgaatgctcgctaatttttccctcaaatctttctggctgatattgcgcaacaactggcctccctgtgccacggacactttgcccgtctcctccgacgccacgattaccagcgcgtcgcttacctcgctcattcccactgcagcccggtgcctggtgcccaggtccttgctgatgcccatgttatccgacaacggcagatagcaggtagccgatacgatccggtctccccggataatgattgctccatcatgcagcggcgtattgtgctcaaatatattgatcagaacctggctggaaacaagacagtccatctggattcctgtactttcatactctgtcagccggatcgcctgctcaacgacgatcagcgcgccggtcttagccttacccatcacaaaggctgcttctacgatactctctcttgtctcctcgctgaaacgcaccttctccctgttagtctcaaaaggcaccacggaactgagaaacttcttttcaccaagtttctccagggccctccttagttccggctggaataccacgattgctgccgtcgccataaccgttacggcattcttggcaagatacaatatggtatgcatcttgaatatggcggctaaaagaatgaatgcagcaagcacgatgattcccttgagaagcatccacgccttcgtgtttttaatccagaccatgatctgatatatcaggaaggtaaggatcaatacttcaatcacatcggtcaggtgaatctccgggaaataaaaccctgtgacatattttcccgcaaatctggtgatctgctgttccattctttcacctccttctttctatgcttctaatcttttaaatccaggtcttttcgaagactctgggtcagaagcatcttatctacttccctcatatcatgcttctttgctgacggtcccttctttgcggaaggcctccttggcgctttcgctttcttctgggacggcgctgctgcattcctgccctgccctttccctgattttctgcgcacctcttcggtattgatgatctcagtctcctgcctttcattgattctcttcaccgtcttctccggcgtggagatggagaccttagggattgcttttacataataataatattcatcatcctcgaactggagattctcgcttcttgcataatccaccgtaaagaagaacaattccagcacaagcccgatcccaacggccgcaatacttcctccgatcaaggctccataggaagtatgtacgccaagcgcgatgtcgccgaccgcgattacgatgatgctggctattgcccccgcgatgatggcaatcttccaggcatgatccattgactgtctgcgtaaagtatataccacaaagaagcagatgatgaatgccacgatgataacccacatctctttattctggaaaacctgcttggcataattggcaacctgggtcagcattccttttgcgcctgccccctcaatggcagcagccgacttcttcacatactccatcatatagaatacgatcgttccacatgcaatggcaaccaggctgaccggagctgccaccagaccgcacgcaatgggaatgacgtatggaatcttcagcacaaaagccagtggcgtcagcagcacaatcagggccatcttcggcgtcagccttaaatagaagatatacatgatcaaaaatacgattgccgtaaccgccaaggttcctaaggatacggcaaacatatgggccagtatcagaaccgttgccattacgacggtaaccatcagcggcaggaaggtacagatgactgccagggcaagggatgcaaccggcgatgccgcggccttcataaaacctacattatggttaattactgaaaatgttactacagccaggataaactggagcgccttatcgaatatcttggaatttctcccatatatctcctgcaggcgtccacgaagcacataaatactatccatctatctattctccttttcatacatctttagcagtcttgtcagatcatggttatacttcttcaccctttgtctggcatccctgtgcttttgattatagatatggctggatatcacggtatacagaaccaccaggaatacatagccagccagaataatcaccgcgagcattacgacaagcccgtttgacatcttcgaaagcaactgctccattcctgccagcatagccagccctaccacgcacgcatagccaaacgtcacccagaggaaagagcatatgccatgcatgcttgcgtaatcttttctgtaatatgcgctgaccttgaaatcttcctttccctgcgtctgttcatagaaagcaagacgggtcataagcttcacttttttttcgtctaacataatccacctcaaaatgttgtcactgtcatttaaacatcattttcagtataacaaatattagtacccttgtccaatacttatagtcaaaaaatagactttttcaacccccgccctcttcaaaatatctgccgccgcatccatagtatttccagtggtatagatatcgtcaaccagcagtacggttggcaccggaacaaacccgcgtcccagtgcgaaggccttccttaagtttgcttttctctccctatggcccagcgtcttctgcgggcttgtaggtatcctccggcaaagactggttgcgtctaccggcatccccatcctcctgccaagttcgcaggcaacgatctgtgcctgattgtagcctctttttctttttcgagtactgtgcagtggaatcggaatgatcaggtccggatcccatcttctgatggatagagcgaattgctccgccatttccctggcataccagattccaaaatttctctgattgtgatacttgaactgatagatagacgtgctgaccggctttccatgaagccagagcgcaagaccgctgtcataatgatgatgtgtatgcgagcagtcatgacaatattccttctccatacgggcaatcggcttgccgcatcttttgcatcttggctcttggatcttcagtttttccagttctttccggcagacaccgcagattccccggctgcttgccttgccacagaatgggcatatttcaggccagagccagcggagggcagtttcatagatttttcgtaagattgtcattgtaattcttggattcgctgtgcaaggctggtattgcggtcctgctcattggtattgcgtatcatctcctggaataccgaatcgcttcccaccagagtcacgcactgccttgctcttgtaacagccgtatacagaagattcctgtggtacagctgcctaggtccctgcagaagtggtatgaccaccgcaggatattcactcccctgtgatttatgtatggtaatggcatatgccagttccagctcatccagtaaagcatagggatactttaccattcttttttcatcatattccacaatcaccgtctcttcataggtattgatctcccggatgattcccatatccccgttaaagattcccatgcctttgtcaatggtcatgccatatttggtggctacttcccattccagctggtaattgttcttaatctgcatgaccttatccccttctctgaacaggcggtctccatattctttttctgtcttccccgcctccgctggattgagatactcctgcaggatacggttcatccgctccactcccagcaggcctttgcgcattggggtcagcacctggatatcgtatggctgggcattgacatacttgggcagtttcttctgaattagagtgataaccacgctgatgatgacattggcatcctgccgcttcaggaaaaagaaatccctgctcttattatccagcacgacttcttccccacggttgatcttatgggcattcaccacgatgtcgctttctcctgcctggcgaaagatcttggtcagcatcaccaccggaaagcattgagaatcaataatgtctttcagcacgcttcccggccccacgcttggaagctggttcctgtcccccaccagaatcagccgcgttcccggggcgatggctcccagcagggcatgcataagcggaagatccaccatggacatctcgtcgataatgatcacatccgcttccagcggattctcttcattgcgcccgaatccattgaccgtctcatcttctggatttccgctgacttccagaagacggtggatggtctgggactcatatccggtggcctcggtcatccgcttggctgcccggcccgtgggagccgcaagacggatatccagcccctcgctctcaaaaaaatgtatcatggcattgatggttgtagtctttcccgttcccgggcctccagtaagtaccacgatgcctcttctggcagcctccattaccgctgtgcgctgcatgtcgtccaggtataggccggtgttctcttcaatagcctgaagccttttcatcatgctggcctccgccacttcgcaggcgacatccagatcatggagcatcttcgccacattcatttccatataataatagtgagaagcatagactctcatgccttctttggattcctgcatcacaatctttttctcgatggccagatccatcagatacttctcgatatcctttatttccacttccagaagctggctggcgcggtaggtcagcgcttcttttctcagatatacatgaccttcgttcacactctgtaaaagggtatagaaaataccgctgcggatgcgatagtcggaatcggtatggattccgaccttggatgcaatctcatcagcggttttaaaccccacgccaggcacatggtcggctatctggtaaggattctgttctatgacacggtacacgctccgcccgtaatgctggtatatccttgctgccagagtcgtcgatattccgtatttctgcaaatagatcattgcctggcgcatgtccttcttttcttctacttgagtggcaatctcccgggccttgcgctcgctgattcctttgatctcagccaggcgttccggctcttcctcgatgatgcggaaagtatcctgcttaaacttttttacaatccttccagccagggctgcgccaatccctttcaccgctccggatcccaggtaccgctcaatggaaaccaagtcctccggctcgcagacttcggatgcctctgccttaaactgcagtccgtacagtttatgggtcgtatactctccctgtaattttaagagttcgccttcctcaatatagtggaagtttccgacgcaggtcatctcgccgtcatcattattcaaattaaataccgtatacccattatcttcattacggtatacgatgtgttctacatatccttttatactatccattaaaaatcttttcgcccacccatgaattctacaaactggccggttccgatggctaccaccttcatcggatcttcggcagtcattgtattgattccggtcttctcttcgattagttcttccagacctcttaacatcgctcctccgccggtcagcatgattccacggtcaaggatatcggcagacagttccggcggcgtccgctccagcacgctgatcacagcttccacgatctgtcccgtggtctccctaagcgcttcttccgtctcggatgaagtaactgtaacggtctttggaagtcccgtgaccagattcctgcctcttacttccatggcttcatcctcgatcaggggataggtcgtgccgatcttaatcttgatatcttcagccgtacgctctccaatcagaagattatgcttcttacgcatatagcgcacgatggcctcgtcaaaatcatcccccgccagcttgatggaagtatttaccaccgttcctccaagggaaatgactgcgatatcggaagttcctccgccaacgtcaacgatcatatttccacagggcttagagatgtcgattcccgcaccgatcgcggcagccaccggctcctcgatcagattgacttccctggctccggctgcataggtcgcctcttccaccgctttcttctccacttccgtcacgccgcttggcacacagatgctgatccgcggcttcttgaatgtacgcttgcccatggctttctgcacaaagtactttatcattttctccgtaaccgtataatctgagatcacgccctggcgcagcggccggatggccacgatgttgcccggcgtccttccaagcatcaggcgtgcttcctcgccgattgccttaattgcattggtatccctgtcaaatgctaccacggacggctcttttaagatcacgcccttgcccttgacatataccagaacgctggcggtacccaaatcaattccaatatctattgacatccttattcccctttcattatgctatctatttgattatcatttgtttctccaattaaacgcatcttatgtgcacgtttcattataatcaaatttccgaaaaatggaaaccccctttttccttaattctttgtgaaccgcctttatcgccgcagcatagcgtcgatatattttcctgtataggatgcaggatttgcagccacttcttctggtgttccctgggcaataacggtgcctcccttatctccgccttccggaccgatgtcgatgatatagtccgcggtcttaattacatccagattgtgctcgatgacgatgactgtgttgccgtcggaagacagcctgcgcagaatctccgtcaatttatgcacatctgcaaaatgcagtcctgtcgtaggttcatccaggatgtatatagtctttcccgtgcttctcttgctcaactctgttgccagcttgatccgctgcgcctcccctcccgacagggttgtggacggctgccccaggcggatgtatgacagccccacatcattgagcgtctccatcttcctgcgaatgctgggaacattctcaaagaaatggagcgcttcctccaccgtcatatttagcacgtcatagatgctttttcctttatacttgacctccagcgtctccctgttataacgcttgcctttgcagacttcgcaagggacatagacatccggcaggaaatgcatctcgatcttcagaatcccgtctccgctgcaggcttcgcacctgccgcctttgacattaaagctgaagcgtcccttcttatagcctctcgccttggcatctgccgtagcggcgaacaggtcccgaatcaagtcaaataccccggtatacgtggccggattcgagcggggcgtgcgcccgatgggagactggtcgatgtcaatgactttatccagctgctcgattcctttgatatccttgtgcttgccaggaatggtcctggccctgttcagttcttttgccagacgcttgtacaggatttcgttgaccagcgaacttttcccggagccggaaacgcctgtcacgcaagtcatcactcccagcgggaactgcacatctatattcttcagattgttctgcctggctccgatcaccttcagccatccggtaggttttgcccgctccttgggcaccggtatctgaattctcccacttaggtatgcgccagttatggaattcttattcgccataatctcttctgcattcccttgggcgacgacttctcctccgtgttctccggctcctggtccgatatccacaatataatcggcttcgcgcatagtgtcctcgtcgtgttccacgactaccaccgtattgcccagatccctcagatgcttcaatgttcccagcagcttgtcattatccctctggtgcaggccgatgcttggctcatccagaatatatgccactcccaccaggccggagccgatctgggtagcgagacggatcctctgcgcttctccgcccgacaggcttccggttgcccgtgacagcgtcagatagttcaggcccacatccatcaggaattggatcctcgcattaatctccttcagtatctgccctccgatcatcatctgatgcttgttcagcttcaggcggttcaggaacttctggagacgctcgatcgaaagcgccgtaacctccgcaatattcttcccgcccaccgtaactgccagcgctcccggcttcagcctctggccgccgcactcatggcagggcgtgatacgcatgaattcttcgtattctgtcttggacgtcacggaagacgtctcccggtatctgcgctccacattacggattaagccttcaaaggcaacgtcatagacgccttctccccgctggccccggtaatgcaccttcacttccttgccgccggttccgttgatgataatgtcatgaattttcttcggatactttttaaaaggagtgtccagagagaacttatactctttgctgagcgcgtccaggattgcataggtaaaactcttcttatccgtgcaggactgccatcccatgacggtgatagcgccctcgctgatgctcagattcttatccgggatgatcaagtcctcatcaaactccatcttatagcccagtccgaaacattctgggcaggcgccaaagggattgttaaaagagaaacttctcggctcgatctcatcaatgctgatcccgcagtccgggcaggcaaaactctggctgaagttaatcggctccccgccaatgacatccacaatcaatagcccttctgccaaggccagcacatcctcgatggaatccgtcagcctctgctcaatgccctccttaaccaccagacggtctacgatgatctctatgttatgcttgatatttttatccagcgcgatctcttctgataattcgtacaagttcccatccacccgcacacggacataaccgctctttttagcccgttcaaacaactttgcatgggttcccttccttccccgcactaccggggcaaggagctggatcttcgtcttctctggaagttccatgatctgatccaccatctggtccaccgtctgtttcttgatctctttcccacactgcggacagtgaggaattccgattcttgcatagagcagccggaaatagtcatagatctccgtcaccgtccctaccgtggagcggggattccggttggtggacttctggtcaatagatatggccggtgaaagtccctcgatgctctccacgtccggcttctccatctgtcccaggaactgtcttgcataggatgacaaggactccatgtaccttctctgcccctccgcatagatcgtatcaaaggccagggaggacttgcctgaaccgcttaggcccgtcaataccactaattcatttctggggatatccagatcaatattcttcaggttgtgttcgttggctcccctgatcttaataaactgtctatttgaattcttttcggtcattactttatcctttcaatagtttcttcaattctactaatttatcacgcaattctgcagctgcctcgaagttcaattccgcggctgccttcttcatctgtttcgtcagttcttttgtcagtttctccagttccttctcgctcatggattccggatccttctccagacgcagttcttcagctgccaccttcttagatacggcgatcaggtcacggacactcttttgtatggtctgcggcgtgattccatgggcttcattatattccatctgtaccttcctgcgccgctcggtctcatctaaagcaagccgcatggaatctgtgatcgtgtctgcatacatgatgacatggccctcggcattacgcgccgctcggccaatcgtctgtatcagagatgtctcagaacgcaggaacccttctttgtccgcatccaggattgctaccaaagtaatctctggaatatccagtccctctcttaaaaggttgatacctaccagcacgtcgaacacgtccaggcgcatatcccgtacaatctcggtacgttcaagggtatcaatatccgagtgaaggtatctgacccggatgcccagttccctcatgtaatctgtcagatcttccgccatccgctttgtcaaagtggtaatcaatatcttattcttcttcgcgatttccttattcacttctccaacaaggtcatcaatctggccttccaccggacgaacctctacttccggatcaagcaggccggttggacggatgacttgttccgcccgcagcagttcgtgctgttcttcatagggacccggagtcgcggatacgaacatgacctgatcaatcttgctctcgaattcctcaaaacttaacggccggttatccttggcagatggcagacggaatccatattccaccagcgtggactttctggactgatccccatgatacatgccgccaatctggggcaccgtcttatgggactcgtcaatcatcataataaagtcatccgggaaataatcgatcaaagtatgcggcggctgtcctggctccaggccggtcagatgccgggaatagttttcgattccagaacagaagccagtctcccgcatcatctcaatgtcaaaattggtacgctcggagattctctgggcctccagaagtttcccctcgctcttaaagtagtggatctgatcctccaattcctcctcaataccacggatcgcccgctccatgctctcttttgacaccacataatgggatgccgggaagatggccacatggttcagctcgttcttaatctcccctgtcagcacgtccacctccgtgatccggtccacctcgtccccaaagaactcgatccggtaggccatcccttctgtaagcgcagggatgatttccaacacatcgccccgcacccggaaggttcctcttttaaagtccatctcattgcgttcgtactgaatctcgatcaatttatggatgacctcgtcccggtccttttccatgccagggcgaagggagatgaccatattctggtaatcgattggagagccgagtccatagatgcaggacacgctggccacgataatgacatccctgcgctcagacagcgccgccgtagcggaatggcggagcttgtctatctcgtcattgatggaagaatctttagctatataggtatcggaagacggtacataggcctccggctggtaataatcatagtaactaacgaaatattccactgaattcgatggaaagaactccttaaactcgccataaagctgtgctgccaaggttttattgtgtgcgatgatcagtgtcggcttgtttaattgtgcgatgatattcgccattgtaaacgtcttcccggagcctgtaacccctagtaaagtctggcattggttgccttccctgaaaccttttacgagctgttcgattgcctgtggctggtcgccggtaggcttatagggggactctaatttaaagattttttcttcactcatatctgcttctccctttattatttttgaatacttgattagtgattacacgaatttttcgtgtaatcaggatattatttttcttatataaatcgtaaaacacgaattttgttgtttttcggtatcaattttattactttccaaagaacaaacgttcttatttcattctatatgatgtactatttagtgtcaacttttctttttagtaatttcttgtattgccttgtcagggtttttattgtacgaaaacagaaggcaaagcaatggatatttcaagaaaattctattatgcttttacgtttttcattaaccccgcgcataaatatacaaaatgtgtaatatttacaacattcccatgattgctttacctttgtcagtttcctatctattatatcacttttccattcaccttactaatttaacgtttgatttccttttttcgtctgaaacgatttgtttagcatcttccctttactctgtcttctgtagcagtaagtctgaatatctttcataagtctcttctacagatccgtatcccataagtgctgtcagcatcgaaaatgaaacctgctctgactttaacatcctttccgcatacatatcccttaagtcctgcgtcgtcacagtagaaatgtctgcttttttgcagattcttttcaatgcggcattcatagaggacaaacttctgtatcctccattgttttggcaagatactaaatcattgtctttataatcattcccaaataaaaccttttccccctcattccgaatttttcgtttttccaactcttctatgataattgacggaacctttaatatcctttttgcactttctgtttcaacctctttttcgaccggaatacaggtgtactttccattttctttcttgacatattctgccaccacctgccggctaatagttactgtccgttcttcgatattaaaatccttaaattttaacgcatagatttctccccttttcaacccacaaaacatacttaaaagcacttctaaataccacgcactatactttacatattttataaacatcactttctcctgttcattcaaaatataaagttccacctttttcctcttgggtcttttacaatcttttaacgggttgtattctatcagactatctgaaaacgcatctgctaatgccatactaaatagttcatacaatttcagcccataggattctgttctggctgatactttatggataactgtctcaagataaatctcgttgacagcacacatcttgatttttggcatatatggtaaggcctgccccaatacatattgatatacctttttggtattcgattgaaaatagttttgctgctgaagccatttttgcaaataatatgtaaattctatacttgcatccttttttctcatcagatttcttttctgttcttcaaattcttcaagatatttcatatagcttttttcagcttcctcttctgttttaaacccgccttttttaccatatctcacaagatactcttcatcataccaacgcattctgtgataccatgatcctctttcaaaaaacgcaaatccatttttgcttttctgtgccataagcctcctccttttttataaaatttctttgtttttaggcatagaaaaaggacagccttttcgactgtcctctatacctgcatatattatgttgaaagatttctttgttacacataaatactactctatcattttataaagtttaaaagcctatgtcaagaccaaatctggtgcatttttgatgcatttctgattcatttttgtttcatttctgcttcatttctgattcatttcgtaaacgcaaaatagcgagtaccttgacatttttaggcggctgctttgcagccaccagtatttaagctttacggatttccgctggaagtttttctgaccatggaagaagctcttccataaagaaacaattcctgtcatccatgtattaccataatcataaccagtgatttcagcagcaacaagtttacctatttcattccaatcatgcatagagcgtccggcaggaatatcagcattctttgaaaatcctgctcctacaaaaggaatcactctattattcacaaaatcatttaacaacggctttggtatagatgatagatatttatattccatagacaatccctctctcattttcttccctagaatccattcagtagaataaaaagcaaacttgtaaaaagactaatatttatcatcaacattaaaaatattaactcaacatacctatatcttcaatttgaatgcaatttaatattgctggtgctgcatcccaactcccagggtacttcattccactatcaaatgtacatctactgataaccgtctttaagtcctctaaactgtccacaccaaacaacaccatcatcttatcacagtatcttcgagatttcattttttcccattcaataggcatgttcttaacataaacataacaagttggaaaccaatacactttatgccagctctgttccttttctgataattcataagcattgcatacttgataaaggaataaatccgcttcagcaatggcttctcctgtgtaaattggaagtttttctctctgattacaaataacatcacccataagagtatatttatttttcatctctgtttttggcttataatactcctcaatgacacaactatgatgtctaaaagctgtataattgtttggcttaatagatcctccaaatatgcttgtttctaaaaaatatgtatatgtaagcatttcgtttattgctgcataatctttaatatgacgcatgaatgcaataacacatataaataattcccatatatagattttaaatatatccaagtcattttgagaaactgaattcgcatttggcacaaatgctttgatacaagtcagctggttatacattgtttcaaaaccctcagctattatctctgcataatctgtttctgtctctgcaatggtttctacaaactttaaatagaaatctctcactggcttggtatttaaaaatatttcgtatactcgttctggactagcattcttttcaatatatccctttaaaacttcgatgtgtgttatttggaatcgggatatacagctttttcttttgttatctgtattacttccatggatttgacgaattaaatcctttagttgaaaaaaatctgttttctcttcgtcaagccattcaggcatttttcctaacttcggttttgtaaattgcggtttttcataaatattacgaagaagtttctcgtactctatctcatatgtctccggatcagacaaatcaatatatattcgtgtttttatatatgtaggaacatatgctttcccatcttcgcttttttctgctataacaggaatgaatttttcttgtttcgtatttccatagatttcactggaaataatcacagtttcatctcctactcctccagtacgatcattcgccttctgtgcatatactttatcacaaacaattagaacttttgttatctcagtatcattaacacaacgttccataaacgcatatttatcctgaccttctttcaaatcccacttatcaaggacaacatcaaccccatgcgaaaccagtctctgtgccaattctagcactatcgcatcactactccaagaatatgatataaatatctttggtatcctatcttctttcaatgtatagttcctcctacttacttactatttttattttatatccatccgacagcacaaatgtctgctcatatataagaaaacactatctctctaaagaatatcggctataacaagcagtagacgtaatatatatctagctaaaacggactattaaattccatttttccacatcaaaatttactttttcaattcagcttattctttaacggttgattttcgtattctattaaacagagccgtttgcacttaagttctcttaaaaaccaaaatatttttttcttacttttgtatttgccataacgctcagataccttttcaaccgtaaacgggctatattctgtgtcacgtttttgctgaccatatcccaactccctcttgcgtattcgataattttcccttcctctttattttcctcgtaaagcattttaagcagcactacagcaaccctgtactctttcttttctgaattttgataaaaatcataaaacattgttttgaaaggataaatacgcttataatagctacatattttttccagaagaatcataaaattctctataaaattactgctgtcaaatatatccccacaacctgcatccggtagttccattagtttacgatgtctatcagcaagttctttcaaccatgtgatcatctcttctgatataacaacttcgtccgtaccgtcccaccagaaaatccggtcatcatccgtcagataataattactttttccttctaattcttctggtgtatcataaaatgtgaaccaattatcctgccgaagaaattcagctgtttttatctccggaattatctcttctttccattttctccgctgttcctgcagctttccagaagcgtactgtttcatctgctcgtcataatatactttatctttccattcttcccacaatttccaaaatgactcctgttttatttctgctgcaagataaacaaatactcgtgccggaaggaacaacgataattctgcaagtgcctttaaattttcgttcctacttttctctctcctcttcctgtccaattgaagaaatcgtaaaagatggtcataaaacttatctccataacactcctgtaaatgcaataaggccattttgcacctgtatatatcctccggataggatgctggtactatattatctaagtttaaactttcagtaccatatatgatatataacagatctgatagttctgttcctccagcagctttaagtaatttatcagggaccaactgtcttaactcatctctcgaaaacggcttatcgtaatcacttctaaaagaagcaatatgttctgctgcttcccatagattatatctctttttcatagaaaatgttgttccgagaatatgattgagccatccaccataaaattgaggatcaattatttctccattgcaatctacaaacccaggacttctatcatacatttcatataacacatatgcagcaagaataacgtcacaaaactcacagcttcctatcttattagaatagaaaatggaatcattcacataaaatcctgcattttcccagctgctttcttcaaaataattataccagaaatccaccttaccttcactcgacaattccactgggcttataagaagcagctcgtgaccaaacaatgaaaccttttcaaactgcatcattccgccatagttcagaattttcatcatttgcttgccaaagcattccctcttttcttctggtatatccatttttcctgtatatcctgcaaatgtacccatactacaccatcctaaaatccaaatataatatttctttgtttcttgtttgtcatcaaagacaccaatgcgcttatctcaatataatcaaagttatccctggaatctttaatgatccactcttctgcctgctcacccgtcaattctggaaaatactcctgctccttgtccaaaagccgctgaataagtataagtgccttttggtaatttatttcacttccatgctccataaactctgcaacaaacttctcatccacatacctgcaataactacgttccaatctagttataatatttgtcaaaagattttctactgaaataacagagggtacgcaaatatcattcatttgctcttcccaatatcggatacactccttcatattttgtgataaaagcagattacctccatcccaaaactctaaaaattcatcttcattttttctctgtattgccttataaaaaggaaacttctggaaatcactttcgtcatcttttgaatcagcttcccatgtgatatcagaatatccttttgtccccagagagtcccatgtttcccagaaatccaagtcgacatcctgcgtataggcaaacacaagacgcacaggcaaaacatataaggagagttctgcaataatccccttttcatcctgacgtgcggacagttcttttcttttggcgaaatcagcatttagcagttctgcaaggaaacttttcattgctgttttttcagtctcttttatacctcgaaaaacactgtatgcatattctatccggctgcatgaatttgcagattttatttcgtttctacaagatatctttccctcttcagggataattatttttttattttcgatttcaaaaaccgccagcaactgctctatatccaatctgccatacttgtccgaataatcctctaataaatctgtatatgtaatatccttatattcttcagaatttctgaaaaaaagatacacttccgacattctaattcgcccaggcaacgttaccttctctcctaataccccctgaatcaaaagcaggtatatttctacatcatacagcttgccagattttataaaatagcagccgccattcgtaaatgcttcctgcaagaccattatcatattcattacaacaccaaattcattatagcccggatcttccacatacagttcgcaagtattcaggtcgtattgggaaatttttctctttttcttttcaaaaattgaataatcaaataaaacaatcccatctgtatttggtcgtgcaggggcagccacagtcactttctttcctgcaaccgtcatttctactgtctttcttataccacatttgtccatgatttcaaggacatatttattcatctcattccttttttctactggaatacttacctttcctgcaagacaaaacatattatctttcatatacagtcctcccgattcattttcatatgcagtaagtaaattataatttctatatagtctgtccattccttttagccgacagttgaaactccttaattgacttctcatactgaataatatcaaattcttcacaatcaacgccaataagatagtttacgatagtctgttctggcttcttcatagtataaatttttatatatagatcaaagctctttttattcacttgcaactgcgagaaatgaagaatagacaatataacccaagcttgcatcattactctttgtcatgatgattactttatcacatactatccgtctctcgcaaagtcagcgtgtttccctctatcgcattggaattgtaagtgtattcaactacattttcctgtcaattgccgccagcaaactctctgctgttttatacctatcgtcttccggtttcttcgcatctacagaaattttccaactgcgcccttcgtgggtaacacccgaaattttcccctctgaacataatatacgaactctcctatctgaaacgccccatttctctgtagcctgcttcactgtcatgtacataaatctacacctctcttcaaacagtagtatcccctgttatcggaacaatacttttcacttatcggaataatacaaaagtccgaaagataccaatctcctatcatttgtctcttatcccctttggagaatacaaaaagtgacctctatgtacgaatcaggttacctgtccgtctattttcatctagtgatattctgcccgcacagtccacaaaaacagcataaaatcaatcgtatttttttacaattgattttatgcgtgcttttaatcatataatttaaaatccctgtcataacaggtatgtttctgcaatgatatacgtcaaatagctatataacaacagactattcttcaatcataattcctaatttttcaaaaaacaaagacacgttacaatagcgctttaaagaatttccattttccatgataaatttccatgtctccgcataagttcccggtacatgaaatgaaatatcatataatgatttcaaaaactccataggtctatcgctatatcggtccgctatttcaaatgccaaatcttctttttcatcatctgacaaatcttcagaaataccatgcaatacatgttccatattcctggagaaaaaatatatttcatatggaaatccggctatattgtctgcttttactaagtaatatacaatctttcttttactgatatttcttctgataagacgatctttattctttgctgctatatacgtttcaaaatattccgtttttccggtttctgattgctgtatcatggtactgggaataaaagctccgtctgtatcaatcatttgaaccactttcaagatatcttctcgttcaataaatggatttttcttcaaataataattaatttcatcttcaatcctattttcaatatattttaccgtcatagcttcatctgcagtaatgtctgtatgcaaaacttcaaactcaatatcatggtcattcacaagattagaaaacaccagtgccaatgcgtcctcatctgttggtccttctacaagaagcaggataatctttttagtcatgtaatcccaccttccccgcgcgcttcatagccagttccattttataaatgtttgtttcattataaagtttttctttctgtccgcccagcttaatactacgcagataagataaccgtttattttgtgtatttttaatatttacagatttgatataacggttctgaggattaaccgttgtataaatcaaagattcattttttaggacttccaatggccgcagattatgagaagtaaagatcaactgtccttttgctttttcctgcatgacctctatacactctccaagcagatactcataaattccggaatccagttcatctactacaagacagtaagatctcctgttatagcaggctaccaaattactgcatatggaaatcagtttttttattccggccgactcatatagtaaaggaacacgtgcccccgcacgtatggttataatttcaaattgaacgccatcttttccattttccatcaacttatcaaaagcgttatagatttcaatctgaatttctggaatcaatgctgccatcactacattaatctgctgtatcgtactagatacatacgggtaaatttcttttggaactacattaatatctgtcaaatgcagcataactccaggtcctttcgctttcataggatttggccagtctatattaactggtatggtatccaaatttagtgccaagagaccataatgtgcattctcaataactgccagatcatacaatccataattttgcaggatactgcatagattcgcaagtttctcaatctctcctttttccttactgaatgtctcctgtgcttttttcgagaacaggaaagaaccaacctgcggcatctgccgttcctcatcaaatccctcggtaatctgttgagccattcccaaagcaaccatactttccaggtttttccgaaaatgttccagattttttaatggtcggaacagttcctggctccccttacgatattcaaaaacaggtgtcagccgtttcccttctatgcattctttcatactcagtttttcataactgatacaaaaactggatcgcccgttttttaacagttcaacttcgtattctgcttctactttacccgcatctgtctggaccataaatccatatttcacatgtgctgtatctgataaacaattgatatagtaataaaaatgaggaggaatttctcttccgctaaacaagcactttaataataccatgcagtctattacaactgttttgccagatccattctgtccatagattccaaggacaccacctttattatcaccttgtgcaaattcaagttccccatgctgcacattttttatattatcaattgttaatcttgtcaaccttactatctgctgcataataaactgccctccttttttatattatatgttatgtttccctttgagtcaattcttatccaatattcgttattatttttaacatttttaatttttcatgttctaaaaccgtctttataactgtattcgtcagttggacaataaactctgtctattctctacctcatgataaaatttatgaatatagccctgatttactttacatacggacgcttctacgttgttaatcatatcccttaacgtagttcctcaccttccacaaacaccatttttttcaatagtccggctgcagttttctcccctcctgtgaggcactctttatctccaaaaactaaaaatgaatcttttgcccgagacaccgcaacattcataagattcggtgctctgttgataaaatagcacccatcttcgcttccatacacacaggaaaacaaaatgacctttcgctccgccccttgaaacgtatgtaccgtcccaacatcaataaactttgaatactccggaagtctatgttttataagattctttatcaaaaaactttggctcttaaaaggtgtgataatccccaatacccctctctcatcaaatccatctttgtctctgtagcatgacaaaattgtttcatattttttctgcagccacattataatagcttccgcttcttctatatttcgtctgcttcctccgtatttctgtgattttgcagtggtaacctgtctgaatcccattaccggaagaacccctcttacttcattgcgctcagctgcataaaaggagcccctcttaggttccaatttcccctcatataccagtttgttacaatatgcgattatttcattataacaccggcgatgttcacttaaaaataaccctcttttatatttattaaatgcacaggatactgcggctaatttcataatactggattgagaacaatttaaaccattttcttcaagcatactgtattcgcttttatttgcaattacctcattactaattgccattgcaatatcaagagttcttgcagttccccatacgggcggtatttgttcctcatcccctacaacaattgcttttttcgctaaggaaaacgatgcggcagcaatctccggagatgtctgtcctgcttcatctacaaccaatacatctatatagttatacataaaatgattttttttctcatttccatcatatgccaaaaactgtttcggaagcataaaaaatgtcataaccatacacggtgatatcatagcaatccgatgatacatatcatccagtatatttttaaacgttttccctttttgcttctcactaatcggattctctttcttcagccatcggctctcataataatgtactgccaaccaaaattccgcatatcttacccgatccaatacatcgttcaatttgcataagtcgaattcattcaacacactatcttccggaactgcaacattatatttttcgaagcttcgatacccctcttttaaatgatccattcttatatctatttcttttttttgactttttaatttttctattttatcgtctatacaaagtttctgttcctgcaattgactctttttcaaatcattatcacatattttctgcatataaactttttctatctcatctattgacatatcacgtcttaaaaataataattccgcttcatttacaaaggaaaatgaccatctttgtatcctgcttttaaaacagaaaagcttttttaataatcgtacataccatggcaattgctgataagctgttcgccattcctgcattctatttaaaaaacattgtatagtttcctgaatattttctatttgattttgcaaatcatttctaattgcttcttcttcccatatatttcgcattatcctttctacatattctccatacgattccttgccgagaacacttttcatattgtccaacatagagagacagtttattctatctttatttactttcttcaattccttccacaatatttcttcgcatactgcaaaatcgatattttctatttcgcttcgaaaatattgatgaaattcttgtttaaataatcttcctgaggaacgtctgttttctgctgactcaagttcctctgcaaatccacctccacgtaccgtcgtatattgatatcgtttttttatagcttcctttactttcccattggaaggaaaataaactgcaaagctattcgttccggtaatccacttatgttctaaattagaaattccaatctctgaaatctgtccaaaagaatcaataatatttgtaaccgcttgattattagtggatactgcaacaataattggcgccttttccttctgcaaagcagattttacatacatgtctgccactacagactgcaaaaaagtagtctttcctgttcccggaggtccgctgactgccaaaagatttccttcatttatttctccaaaatgattcatcgcctcacgctgagatggcgacagtggatatgcccctcccatttgtccagcgtgagctttcattttacttatatcagtattttttatcaatggttttgacggctctatctttccattcgttattctatcgtacaaggaattagctctttcctttaccaaagcattatacaactgcagaatataaaaagaagcattgactgtcgaatcctgaaacaagtaatatctgccatctaatttaaataattcatttccatttctaatatagttattttcgaatggcgtctgtgtaacaaattcatagagttttatcgcatatgctaaataatcctgccacgaattcaattgatatctttcgttcgtagtatcctccaaaaattcatcatatttttcgacatctcctacagcaagcaaaggctcctccataggtcttaaatactcacgtggtatccaaggtatttttccctcattcggcttacataactctccgtcgcggtttacacataacggcaaaaagaaaaatgatgtcatctcttctatattatcttcagtctttccaccatcttggaattccgttgctaatgtcttcaatgcaataattacattttttatctttaacttttcttcatcaatattgccctctgaatcatagtccatcttccatatattaaaattattctcttcacttaactttccagatagtaattcctcttctgcaactacaaaaaaatgctcttttttatagtctattgtcccttgcatatttgctgccacagcatttctgaaatatcttgtaacacttttcactttgaatcttctcctactataataattgttttcataattttagcaaaacaattatctcttatcatttgattacttgcttctgtatcatctgcagttattccctgttcataagcatattgtataaatcctccacgttcttgctgacctcccaatcgcactcgactggttaaagctagaaagtcaaaacaggcgacaaagcatcgcccattctcagaaattcgattctactttttacagtttttctggattttcacgcataaatacaccacttagtatattcatgtgattacttctcctttatcatcatcctccaaaatacgatttactaacttttccagttctttccgattcggtaaatacaactcatatttagaaacaaacaaattactatccattccataagtagcatattcaactaataattcatctttattcttactcaaaataatccctattggagggttatcatcttccatattttcttcagttgcaaaatatcccatgtacatattcatttgaccaatgtcttcatgttgtacggagtttttcttcaaatcaatcagcacaaaacattttaaaatccgatgataaaaaactaaatctacacggtaatggacattattgatagtaataccatactgtcttcctacataagtaaaaccctttcctaattctaataaaaatttctgaaggttatcaataattcgctgttcaagatcactttcactatattgttccaactctggtatattcaaaaattccaatgtataggtatcttttataacatcttctggcttgttgatttcaacgcctttatttgccagctccaaaatcccctccttgtcccgactcgctgcaagtctgagaaacagagctgaatccatctgtctttttaaagtccgaatcccccatctttctttcacacattgtttttcgtaaaaactacgctctaaatcatcgtcaatcttaatcaactcacaaatatgtgaccagctcaatttgtcagacactgtctgacaatttggatacttcaaatagaacttcctcatattattcaaatttggtctgctataacctttccctaaacgcaatgtcaattctttcgaaagtgttgacaacaaattttttccataaattgccttttcatttccaaactgctcaaattcaacaatatatcgtcctattctccaatatgtttctgtcattgtctgattaacagcacctgtgaggtgttctttggcaaccgctaccgttttttcaatttcagagatcaaataatccatcttatcatttcttgtaatttcttgcatatatttcctttcctgaatttgtcaggcagtgtctgacaaattccaaaatcttatctcttcgttctacttattttctctagtctttcgctaattatatcatttttcccatgacgctactactctattcttgattccttttttctacaatatctactctaataatctctccatttcttccgtcaaactccattcccacatagttttctcctcatttcctgttgtcatttcaacagaaggctgaaaatcccgaatcagttctttcatatctacataatgatccgcagtaaattctttttttgtatgtcctagagtttttgaaactgcttttaaggaatatcccgcttttaaaatcgttgttgcatatgtatatcttaggattctccaatttatatatggtacatcatggttcaaaataaaatcgtgtaactgctttcctaaataattgcccgttctggggcggccgtaggtagaacaataaataaaatccaagtcctgaaattctccttttcttctatttttatggcgttcatatctggttctctcttccatgatcatttcaaataccatatccggtatctttatctttcttctacttgcaggtgtttttaaatcaatttcctgttttgtataagtttttaatttcatatttgtttctttcatattaggattccttcccaattgtcgctgaatatagatggttttcaattcgtaatttatatctgtatattttagtcctacaatttctcctctcctcattcccatcaaaacagcaaacatgatcggcagaccaattggggtatctcttgattcactaagcagatgctgtatttcctgtattgtcagcgctttcttctgtccgctttttgatgatttctttataactctgttccattttaatcctgttacataatcttcttccacatatccatagcgcaatgcatacttgaaagaagttgtaagcacagtcttcacaatcttcgctactgatggagatgtctcatatgtttttttataaattctctttacatgatttttccgcagtttccccatagataagcgcccatacaacggcaaaatataattttgaaccgtttttttaaaagaataatatgaattataagaaagcgacttctttttgacttcctctagccaaaactcataaaagtcctgaacacttgtatttgcataaaccgcataatgattactatacaaagctcctattactctttccctctcctcttttgcctcactttcctttaagtaaccacctttttgctgttttataacagaatcacacaattctatctctacagaaaagcagaattttcctcgatttaattggatatcccctacactccattctataattccaaacatcaaaacataccttcctcccccaaaatctggttgatatatttattttgatcttcattccgtactaacaaatccgaatatctttcatatgtttcttctatcgttccatatcccataagcgcagttaactttaaaaaagaaacattttctgatttcaacatcatttctgcatacatatctctcaaatcttgtgtggtcatattgggaatccctgcttgtttgcataatctcttcaaagccgcattcatagatcccaggctcctgtaatccccatttttttgacaagatatcagatgatgttctttatatctattcccatataaaattcttttatcttcattcttcgttcttcttttttctaactcttccataataatttccggaactcttaatattcttctggcattttccatctcaatttctttttctgtcggaacacaaatataatttccatcttcctttttcacgtattccgcactgacctgatgggttatggttacagtccgttcttccacatgaaaatcatcaaatctcaacgcatagatttctcccctcttcattccgcaaaacatacacaggagaatttccagataccatgagctacattttgctgatctcataaaaagtgatttctgctgctcattcaaaatatgaagttctatcttttttctttttggtcttttgcactcttgcatgggattgtattcaatcaggctctctgaaaatgcgtctgataaggccatactaaataattcatagagtttcaaaccatatgattctgttctttctgaaaccttttgaatcgccgtctcaagatatctttcattaactgcacataacttcattgtatgcatatacggcaaagcttgtcccaatacatattgatatacttttttcgtcgttgattgaaaacaggtttgacattgcagccactcctgcaaatactgcttaaattctaatcttgtatcttttcttcgcattagagttcttttctgatcctcaaatgctttaagatattttctataactcttctctgcttcctcttctgttttaaatcccccttttttcccatatctcacaagataatcttcatcataccattttatcctatgataccatgatcccctttcaaaaaatgcattcccattcttactcttctgcaccataagttccctccttggtcgtgaatagttactattttgtaaatttaggtatagaaaaaagacagcctttctgactgtcctgctatccctgtatgcactataacgaaaatatcttaccaactgctaatttccacagcatttttaaattcatcagtcacttcctggttaggaataaaaacttcttctctttctccatcataggcaagatatcccaaatgaattagtaatgtaagcacgtcatctttactcttcatttccagcatatcgttttggaaggtctttatactgattttgcttctgttgccattcagcagcgaaagaattgcttctttaagcccctctttatccatattgatatagtattttaaaccctcataagtttctgtttctatccaataatctccaaattctttattccgtattgcctgtataatagaattgggattgtatatcgaaaaagtcttactaaatgaatatccgtcatacctttttttaacttccgcatactccaaaccatactcccgacacagttcatgtacttctttatttgtaaatcccacatactctgcctgaaactgtggctgtatcatagtgtactcacgaaaatctggcaatgcagatggagtaccatattttttgattggaaggattcctgtgatatatgccgcttctatcattttatctgtactgttactctcaaacaacgcttgaagtaatcttaaatattctttctgaatcttcttatcttgttttacttcccgaaacaaaacgtcccactcatcaataataatgataaatttctcaccaattgtgctgctgatatctcgcaaagcaactggaagattttcttcttctatggtagcaaatggatatgtctcacgtaattcacggattacttctctttgaagatacctgacacactctcttatttcttttactgtagatataaaccataccatatccagataaatgacaggatatttatttaagtacatagaaaaattttttgattttgttatagaaaggttctcaaacaatagtctcgagtcacaacttttatcataataagcacaaagcatttgggcagcataagattttccaaaccgtctcggacgaatgacacaagtaaatttatcttttgttcctaatgtatcattaatgtaaccaatcagcttactcttatcaacatacagcccttttctcatagattgaaaacttgcatttcctagatttaaatagcgccccattctcctcttcctttcaaccacattttctgcaaccttctttggagaatacaaaacagtgacctctatgtacgaatttgttcgcctaaaccactatttcctaattcacgatacacgtatgacgcgtaattttatacttcagtatagcataaaatattccttttcaaaactgtacaaaaccattccgcaaatttatatactccttggttttcttctctaaattaatattgtttctatttcatttatcatagttccataaaatactaagatttatgttgatattttaatttttttatatataataacagtaagcaaaatgtttgctagtcatgacagttagaatatcatgaacgtgtatgtttagcttccgcaagcgacggggtgctgaaaagtgtagaatatcgattacatgtttagggcttgccgcaaggtgagccctttttacgatagaaaatcgaaataatatgcgacttgttgcaatcagcacagctctttttgattaatccactatgctgcactcccttcctcattcacatttttataaaatgggattaccttttcccactttctgaacatttcataatcaatgtcaataacggaaaggactgtatcatattttaaattcaaatctactactaaatcagataatctatcttctatttctttgctcagaccgccattcaaaagtaaagcaatatctgattccaccgtattcgtccctcttgcaacagaaccatataagacaatacggataacctgatatccaaatatagataaaatcccgcccacaagttctttaaatagcatttgtttcatatgatgtacctccttcccctttcattatatccatgaatccccaaatacagataattattttcaatatttctaggaaactatctacatactttctttgataaccaacacttcttcctctgttacacctgaaattttataaatctcagaaagcagatatttattctgtaacattacacgcacaacttctcttccttttaattctaagcacatacagcataccatcaatattctctgaattaaacgtcaccatctcaaatcttatattcctgttccgatttattatccaattaaatatataccgatccccattagtgccagtgcataatccaccctcatttgcttttctctctgcttgatttccttgatttgtactggtgacaaagaagaagtattaaaatcatattcctcctgaaaatagtgttcaaatgattctttataatcaatgtttgaaatagctactccttttttctaggtattcgtatttttctttaatacggatacgctcagccatttcttcaattttaaccttatcggcatcttcaagacttcccttcaaatacaccaaagaatcttcttctgtcgtttctttaaaatattcctctgtacttttgggcactaaattacacactttattaaaaagttcaagtgccggagtctgtttgccattttccagcaaagacaatgttgatctgttaatccctaatttttctgcaaatgcagattgtgaatctgttcctcttaattcaataagatccttacaaaatttttctccattaaattctttcatgttctctcctaaattatgtttataatttaacaaacagcatacctttcatcaataactctgtcaagtaatctggattagctacatcttttgcttttaaaatattttttctctttatcatgaaaatctatctttttaactttgaaaaaagcttatttcaagaactatatactctaaaagaattatatttttatactatccatgtcaatttttctttgtataaatatactcacttcttaaaatcagctcttttgactctaattttcaacaacgcattcatgaaatgccccatcatttatctcttatcccctctggagaatacaaaaaaagcaacctctatgtacgaattaggtcacctgtccgtctattttcatctagtgatattctgtccgtacagtccgcgcaaacagcataaaatcgtcccaaaaagcgtataattccattatttttccaacttgtcattagtaggatacaaaatactccactgcgttgtcagggaacatctccttgaattctccgtacaactgagcagcaagtgttttattgtgtgcgataacgagcgtcggtttttgcagttcctgaatcacgttcgccatcgtgaatgtcttaccggaacccgtaacccctagtaaagtctggcattggttgccttccttgaatccttttaccagttctgcgatagcctgcggctgatctccggtaggctgatatggggcttgtaatttaaattctggcatattaaaacctccatttgtgacttttgatacgttcaatatcagccacattttaaaaaccattcgtaatgaaattcgtaacgaaaacttaaaatccccgacttataaatcacttttacgaattttagaaagcaaaagtcacaaaaccgattttcggggattaaacatcattaaataacactaaatcaaatatataggcagagtacctcgcaaaacctgcggttttcctcagtcgcctcgctcgtcagatgtctgaaataatatttacccatgcaagcatggcaaatattttccagccgcctgactctgccttaacgcacattatatcaaacatctttctaaaagtatatatcccaaagcaaagaaaagtacaaatgttcgatttttcatttgtactttccatatttccatattcaacacttaaatgcatttttaaattccagttggcaagagtaaattccagcgtcatggaagttactcttgcacatatatttgtcctattgcccttgatattcataactccgtataatgtactcgcagctgattgcctgcctgtgcagatcggagataattatgaataataaaggcaatcaaaaacatttaacatttgaacagcgtattgatatcgagaaaggactcaccgagaataagagtttcgcagaaattggaagaattatcggaaaggacccctctactatatcaaaagaaataagacttcatgcacatacaaaagaacgtcccgatgcaggatatacaaacccgccgtgtattcatcgtaaaacttgtaaaatagtttgcctttgtgatgaacagtgtggtattctctgtaaactctgcaggtggaattgtcaagaaaagtgtagtcgtataaactcactaaattccatttgctcctacgctgcaagaagtgtctcttcctgcaacaatctatatacggccggaggataacctcctggattagccgtatagattcttttttgattgtaataagtgaagacatatcggaaaattattgacttcacgttttctcttttcatcctatatgtaggtattcgatagagtaattcctttttcaatgtggcaaagaaactctccatccgagagttatcatagcagtgatctactccacttaaactttgatcaacgcctgccttggataatgtttcgcggaaagattcacttgtgtactggctgcctctgtcagaatgaagaatacagccatcaagctgatatctcttcgttacggcattaaaagtatctatacataattctttcttcatgttatctctcataacaagggaaagtatttcaccattatatcattttgggataataacaacaagaaagtattcctattttatactctcccatgaattgaattaacatattgagatattaaaatagccgactagttttttacattttcaaaccaatcagccatgttaattcttaccacatttttacttctctccagataattgctgtgcttctctttcaaatacatgagagatgtcatagagttccggaacatcagaaatcgtacaaacacttacacaataattcaaccacggaatttcttttgtcatttgatagatgaccgccattgcttttgcttctgacattacttcaatagaatggtagcctgatccttgaatatgttcaaaaccattcttttcaaaatatgtcctcacatcataataagcgttatgccaatcacctttcggatagtgttctttcagtgcctctgtatctaaatcaaaattgataccttttctctgtgtactatccattgattagttcctcataaattctgtaatcaaattttctttttcactgccattataccaaaagcattcctgtaaatgcattgaaattcctgctgcacttttcaatgcgaatatagctgcccaaaatcttccgtagtcttgcttgcgtcctctatcaaggtacactctacgtcccggctgtctatctgcacagttcaaatcctctttttcaaaaatctggtctgtctgctcacaaattctatccatatcactttgtgtcagcttactagaatcaaattttatctctactttatacattacattcaccctttcaattcactgaaacgataactcatttacttcttctcttatcattctaacattaaacctttaaaaaatcatttcttttttcatattcaaattttatttacccttacacatttattatgctttattattgtgtgaaagtaaacctttatttcaccacaacagcggtgaggaataaatttattggtttcttcaccaaatccttgatttttcaatttctaaactttatccacattcatattgttcgtatcgcctgttattcacttcggataagcccagtaaaccaattttagaaaaaatgcttctcccgctatcatatcagaatataaaaataaagtacagagccaaatcgaatgtttgttctgtactttatttttgttgccatttgctgtacttctgctgttccagttcgtatgacaaatcctcgttctgttgccttttttccaagttcagttctgttgtattctgtcattagaaactcctccatttatcaaaccgtacctattagcaggaataactaatttccatataccatcatagcgtccacttgtatcttcctttgttaaatatctgttactcaaccctattttttctttacatagttcaaaaaacgcatcacttaatcctaattttttctgatatggtaatagcataatccaattttctttttctctccagcgccgactgccattgctcttctgtcagaaaatcagggcgccgcatatcttccagcccgttcaaatcaagtctaagttcagactgagccagacaggcagcctcgaataaagtcatctcagtctctgtggtctgggatactacatctggattgctagaaaaagcatgatcatgatcgaaaagcggacagtatccgataagccttccgcttgcattctccattaaaaatccccaattctgctcatgcctgtcattattattcaaaatgtaatctgcaatctgcatttttaaataagccgttctgtctatttttattgcctctacatatggattcaaaccatagccttcgcaaaatacacgaaattcttcaaaggtcaccatggcaatatcttcggtcgtaaacagtctggaattaacgataacttctcctactccctctatccattccattctttctttagataagtaagaatgaatctcagactcttcggatcttttatatggtatatgttcaatatctatcacatttaaaatttcatctgccggaatctcatactttccaactttatgaagatacaagccatccgcctgccggatccagcctttcgcgcttgcccccagcgtcgttaattctggagtatgaatcgcattttttatttgcgcatcagccgtataggtaacatttcttcctgataaagaaatctctgtgataaataaagaaaacggattctcaaacaaattaacctctgcccacttcttatcatcaccctcttgcaggatccagtaagaatcctctagactcagtcccctgcatgccttgcatacagcatatcggttcttttgagacagccttaagctgtttaatatttcttttgcataacttctgccaatcgaaagcgttctgccggatgcccattcaacaaaatccaccagagtgatcctctgttttctgagcgcaaacggaagacgttcaaaatctaagatttggcatgctccattttcatcgatttccagtaaagggctatctttcaacattaaccgcatccgtttttctccattctctcttaatccatatctctgatagacaatttcaggaacaaatgttctttttcattttatcctattatatggctggtgtcaatcacaagaaaagtcgcccaccataaatttgatgttctccattgcggtcattttcccgctatgctagaatggattttacgagcttattgcacattcccaaaacgcaaaactaccagtaccaaggggctatttccattcctttcccaggttaagcgatgctacttcgcaattgcccacatgcggaccgggagccctgtggctccttcaattggaagaaacgctgcaaatacgatggcgcctgccggaggtacctgatccagattgcacatgacctcgacctgcaattttcccttccccagcaggtatctttcgcatgccagatcccccgccttctctgccagagcggaggcatccgtatccagcgtctcatgcccgttggccgccgcattcctgacttcatagatatactgcagcgcttccatggaccagcctgggaaatgttccccgccattctcatccacattggagatcgcatccatatccggccaccgctcgctccatcctgtgagcagcgctacaaacgccccatccggaatatctccatacgcttcttcatacgccttaatatcctccacggtaactgcatagtgcacatcttccttcaccttctcggacacatcgatcaccacgagaggatatgccatgttccgcacggtatactgctcgctgagcggctcccccttcacaaagtgtcccggaaaatcaatatgtgttccaaactgccccggaaacttgaaggtctggatcaggcattccagttcatttccccagtcataggccgttttcccaagttctaccgcgccttccggtatccccgcccaataggggctgtgattgttcagtggatgtgataattctatccagcgatacttcttcaattcttccaacttttcccataattcatacataatctggtcctcctctaataaaatgcccaaaactactcttcgtctaaaagccattatacattttcaactgtcttaaattatatccccatcatcaaatggatccccacattccgggcagaacttaggcggattcttcatatctttcggttcccagccgcatttatcgcagcggtattggggaactcccgccggcttcttcgctccgcattctgtacagaattttcctttgttcaccaccccgcaggaacacgtccagccctcctcagggattggcttgggcgcgccgcattcctggcagaactttccagtatttcctgccatgccgcaggcacagatccacccatccatcgcgggggttccgggctgataagcagctgcctgaggcctgacattctgcggtccttgccccgtctgctgccccatctggtaaagattctgcgcattcatgcctcccagcgttcctgccattcccatgcccatgaaagccatggccggacctgcattctcattcttcgccgccgcctgcatggccgctgcctgcgcctgcgccaggtgggccgctgccatggtcggatccttcatcaccgccgtccgctgcagttccttaatatatgcctcatcctcctcggatgcggtcacgctgttcacgcctatggatacgatctcaattcctcggatgtcctcccatttatcggataggacttccttcagggcatctgccagttccatcgtatggcccggcagtgcgctgtagcggacgcccatctcggatattttggcaaatgcgggctggagcgctgtcaaaagttcgcttttgagctggctgtccagatcctttgttgtaaattcatcgtccacattgccgcatacattcttatagaataggatcggattgttcagctgataggaatattgtccaaaacaccggatggcaatatccatgtccagcccgatattatagtcaacgactctgaatggcaccggattcggcgtgccatacttatttcccatcatttcctttgtgttaaagaaatagaccctctggtcgtttccagtctctccgcccatcgtaaaacgtttcttaagggtattccaggaatccagaagcccttttccgaaacctccgtagaatatggtaggctctgtagaactatcccagatgaactcgcccggctcagatgaaaattctaccaccttgccctgttctacgatcatcatgcactgcccctcgttgactgcaacgacagagccattgctgataatattgtcgcttccctttttattggagccccttctagtcgtacgtttgactcccttggtcacgatcactccgtcctccagggaatcgcaatagaagtattccctccactggtctgccagcactcctccaactgatcctaatgccgctttaatcaatcccatatctgtatcctcctgctctaaaatttaccgctggcgccgccatgcatattcccatgcttatccttatgcagcgttgtcctgttatgactgccataatgctgtctgttgtcctgcttttgctcgatcggcttcttcgtgatgctgctggtaagaaatatatccctcttgcgtatctgggtcgcagcatctcctctctggtagtcctgggcatctttctgcatatttgccgtcttcatcccggacttcaaggatgccatataaagtatggtcagaatcagtccgcagacaagtgccggtatgatataatcctccgggcctttcggctccttgggctttgcgtccgtttcttccgccttttcttctgccttttcttcctccttgctctctgcctctttctgcccatcggcaatagcagaagccagggcattgccaagttcattttcttctttttgtggattcaaattacgctccagcgtcttgtccagttccttcaaataagattgaaacccctgatagtactggtcagaggaaaaatatccggatgccgcatgatctcccaatgcggacaagtcgtaatcggaaaacatggtcatggctgcaccgttggtggagattgcccattccctgcttcccatatccagcagaaacaggattccgtccttgccctctcctatcccatatcctctgttcacatactgcatgtcagcctctgcctgggctgtgccttcctgcctccgattctccgtcatcagcacaatgtctatctggtattgctgggtcatctcatcaatctggcttgacagccgggtctcatcataatccgacagtatccctgcatcatctatgactttgggcagatccgtcccctcgctggctgccaccggaatgacgtttgcagctagcaggcataaggccgccgcaatcaatcgtaatctcttcatcatcttctaccctttcctacaattataaaaataaacggacaagcatgatcagcatgtaaaccgcaatactgcttccagcaaagaagcccaaggcattcttccagaatagtcccgaatccaccggcagctcgcctaccagctttcccgtctgcccattcatggcaaaccggtaaatcttgtctttatattcaactttcaccacccagacgggcagcagcgcataatggactgatccattggtgcagccaatctgtgaattcttcagcatcaggatgtcatattccttcttgtcaacggactgctttaaaatgtcctgaaaactggtcttaatcctctcctgcgccctgccgcggctctcatctttggaaacgtcatacttgatcgcttcatagccggacaggtatgcctcgtcaaacgaaacggcctttgacatgtcatatggctcgatagattccatataggcgtcatccatttccacagatccatccaccggcacatagtcaaaacttacgcggccttccctggataccagataatagtctgtctgtatgtattcatactgctggtccttccattttttgatcctctgtccattataattgatggttccctctgcctgacagctgaacagccagaatgggacatagattcccgtgatctccttgatcttctggtcgctttggaaggatcttggaagcagggccttctttttgcagaatcccttatatgcttcttttgcggctttcgcatccagttgaaacggcacgataagatccggcttaaatccccctgatacctgttccggaagaatgaccgggctgtcgcagtatgggcacttggttgcagccgtcgtctcccgggcttcgatctctccgccacaggacgggcatttatataccctgcttccatcttccttgaccacccattcacctgttcttccaaagtcggtggttccccagtcgtaggtgtcttttttctgctccgtggactcgactacctttgcatattcctggtaggtctccatatccatctcgttgtcgcagctcgggcaatgaagcttctgggtgtcgctgttgaacaccaggtttccgccgcagcaaggacacttatactcttttacgctcatgctctctacccctttaccttttgtatgcctaattatagatagtatatcatagattgtttctgttttgtataactgtcagcatacaaaaaacattacaaaaaacatttccattattttacaaaggaaggccagcgcatcatcgaggcgctggccttccttttattcccgcaggcttaagatcccttccataagaatcttcacatcttccaaaatatagtcgaatgcgcctgccttatacagatttattacgatcatcccgatcgggaccgcgaagatcattccaaaaataccgcctgccttgtatccaatatataagaacagaagggtaggaagcggctgcattcccatgctgtcccccaccagtttcggctggatcagctgccgtaccagctgggtgactccatagaggatgatcaggcccaccgacatcctgtagtctttcaccagaagtttataaagcgcccacggtatcagcgcggttcctgtcccgaaaaaagggagaaaatccaggaatgcgatgagcagcgccagtaaaaaatagaagtgtaccttcagaattacaaagccaatcaccagaatcaggcatacgacccccataatcttaaattgggctttaaaatatccgcctaccgcaaacttcagattgtcgatcaccatgctcatgcggcgcactatcggttccggcgataccttcttcgcccactctatcacctcatccctctccgcaatgaagaaataggctgagatgaatgtaacgatagttgctatcaggacggatggaatccgttttgcgacatttccggcagccgccaccgtgggctcgctgatccttcccatccagtcgcccatagtcttatccagattgctggtcatggtatgccatgcatcctgaaggctcgccggaagcactttgaacacgccgtttaaactgcttccaatctctccaaatccggactccagatcctgatacatctttggcatgttctggatcaaggatgcgatctctctccatagcttgcttccaataaaatagaccaggatcccaaccgcccccaataccgcgatgataatcaatgcggagccaagcttcttaacgattttaacccgcttttccagccaattgacgattgggctggcaatataggagataaaccatccgatcacgaatggcataaagaagcccagcagccggaagcctacatagatgaacaggatcgtcgctatcaggctgaaagtcaggctcacgatcaccttccaatagggacgggtatcatgcaactgttccttaaagttcgtctccatatggctactccacctcttctttgcccagcaattccgtctctacaaacgcccagatatcgtcttttccctgcttggtcacagaggaaaatgggaggaccttggttccccgaacaagattaagcccttgccttactgccttcagatgcttgtcaacctggcttcttttaatcttatccagcttcgtagctatgatgatcggattgtacccttgtgccacgatccagtcgtacatcatcttgtcattggcagaaggatcatggcggatatcaatcagcaggaataccgcttttaactgggctgatccgtgcagataccgttcgatcaacttcccccattttgccttctcctgttcggaaaccttcgcgtatccatacccgggaagatccaccagatacagttcttcattgatattgtaaaaattgatggtctgggtctttcccggcgtagccgatatcctggcataggacttgcggttcatcagcgcattgatcagtgatgacttccctacatttgatttccccgcaaaagcaatttccggcagctgattgtccggcagctggctggttagcccgcacacggtttccagatttatatttctgataatcattctatttccctttcctattctgccaaagcgattttcaatacatcatccatatgggatactggaataatctccagccccctggtaatctccgaagagatctcctccacatccggctcattctcctgcggaacgatcaccgtgcggatgcccgcgttctttgctgccagcagtttttccttcagtccgccgataggaagcacgcggcctcttaaggtgatctccccggtcatggcaacatctgcccgtacttttcttcctgtgatcgccgacatcatggccgtagccatggtgattccggcagatgggccgtctttcggaacggcgccctccggtatatggatatgtacgtcatgctccttgaagaaattttcctctatcttatgctccctgctgacagagcggatgtaactgatgccggtccttgcggattccttcatcacatctcccaattgcccggtcagcaggatctctccctcgcctggcatgacattcacttcaatctgaagcgtgtccccgcctacgctggtccacgcaaggccacggacgataccgatctcatccgccttattggccatctggtagatatacagttccttgccaagatagagatggaggttgcgctcggtcacatgaaccgccttcttctttgtctccaggatctctctggctgccttcctgcagatgtccccgatcttacgctccagctgcctgactccggcttccttcgtatagttgcgggccatcttccacagcgcgttccggcttatggtcagctgatccggcgcaaggccgtgccgctccagctgctttggtatcagatgctcgatggcaatatgcatcttctcattctccgtatagctgctgacttcaatgacttccatccggtccagaagcggacgcgggatggtctgaagcgtgttagccgtggtgacaaaaagcacttcggaaagatccatcggcacttccagataatgatcccggaacttgctgttctgctcactgtccagcacttccaaaagcgcggagaaggtgtctcctttataatcattgctcaccttgtcaatctcatccagcagcatcagaggattcttgacacccgcttgcttcagcgcgctggcaattcttcctggcatagcgcccacataggtcttcctgtgcccccggatctccgcctcgtcccgcacgcctcccagggaaatacgcacataaggctttttcagcgccctggccaaagacttggcaatggaagtcttgccggtacccggaggtccaaccaggcacaggatgggggaatctccctttttcgtcagcgccctgaccgccagaaattccagcacccgttccttgactttctccaggccatagtgatcctcgtccaataccttcttggcataggcgatatccttgtgatccctgcatactttatcccagggcatttccagcattgtctcaatataagtgcggatcactcccacctccgcaggactgttcatggagttcttaaaccgcttgatctccttgccaagcttctccttgacttccttgggggcttttaaggcatctgcttcctgctggaattcttccgcgtctgaaagcgtattgtcatctcccaattcctcgcggatcagcttcatctcttctcggagaatgtactcccgctggttcttgtccactcgctccttgactttcttctgaagttcttcctttacattgaggatctgtatctcgctcaccagcttataagccagaagttcatagcgccgcatcagatccggctcctccagcagctgctgggcatccgtataggaaaatggcatgttggcggctatgacgtctaccagttttttcagttcgttgatattttcaatttgaaccgccagttccttggacagtttcggatcttttaaaagatattccttgaaaatgtccttcatcccccggatcatggcgtccagattcataggattcttctcagcgcccgtatcttcaatggatgtatccgtatctggaatcaccgttatatttgccctcatataaggctcttcgaattccatcacattgatgcaggcccttgattctccggatatcagcacccgaagcattttcttaggtaatttgactacctgcctgatggcagcgacgcagccggtctggtacacatccgtaacccccgggctctccgtctctacatctttttgggctgtcaggaatatcttctggtctcccagcatggcttcctctattgcctggatagacttgggcctgcttacgtcaaaatgacgcaccatctccggcaatatggacagtcctcttaatgctaccataggaaggcttaatgtttctctgttcatatactattctcccagttataaaactggcgggcacaaatgtctttcttgcacccgccatactattttatgcactctcagatctgacggatgcgtgctcgcattccggttctccgattccttttacaacatcttctgtaattcggcatgattttaaggtctcatcagatggagccttgtacatgatatccatcatgatattctccatgatggctcgaagccctcttgcgccagtcttccgcttaagggaagtctccgcaatcgcttccagcgctttttgatcaaagatcagatccacgccgtctagttccaacagtttctggtactgctttacaatcgcgttctttggctctgacagaatctgcatcagcgctttcttatccaacatctccaatgcgaccgtcaccggcatacggcctaccaactcagggatcagtccgaatttcaccagatcctgaggcagtacctgcgcaagcagcctgtctacatcattctcatgcttctttgcaatatcggcattaaatccaatggatttctggtcaatacgcttttcaacaatcttatcgataccttcaaacgctccaccgcatatgaacaggatgttggtcgtatcaatctggatcagttcctgatgaggatgcttccttcctccctgcggaggaacattggcaaccgtgccctccacgatcttaagcagggcctgctgcacgccttcgccggaaacgtcccttgtaatcgagggattctcggactttctggttatcttatcaatctcatcaatatagatgatgccgtattccgcgcgctcgatatcgccgtccgcagcctggatgatcttaagaaggatattctccacatcttctcctacataccctgcctccgtcagcgcagtcgcgtctgcaatggcaaacggaacattcaggatcttggccagggactgggcaagcagcgtcttcccgcagccagtaggccccagcatcaggatgttgctcttattcagttctacccccatatccttctgggccataatccgtttataatgattatagacagccacagagagcactttctttgcctcttcctggccgatcacatactcatccagaaattctttgatttcttctggcttcaggagattgatgtcagcgaatggattccaatgccttccatcatcatattcgaattcctcttctataatctctgcgcagacatcgatgcactcgtcacagatataagccccgttggggcctgcaatcagttttctcacttggttctgcgtcttattgcagaacgagcatctcacctgatcgtcgttctttcctaccatactctcacctcataataataaggaccgatgcgcaagactaacggctcttgattacttcgtcaattaaaccatatgctttcgcttcttccgcagacatgaaattatccctctctgtatcgatccggataacgtcaagcggctgtcctgtattctctgctaatatctgatttaatttttgacgggtctttaatatatgttcagcggcaatctgaatctccgttgcctgtccctgtgcgccgcctgatggctgatggatcatgatctctgcattcggaagagccagcctcttgcctttggttccccctgccagcaggaaagatcccatgcttgcagccattccgatacagattgtctcaatatcgcacttgatatactgcatggtatcataaattgccagaccggctgtcacagatcctcccgggctgttgatatacagatggatatccttttccggatcctctgcctcaagaaacagcagctgtgctacaatcacgcttgcagacacatccgtcacttcctcgcccagaaaaatgattctgtcttttaataatcttgaatagatgtcgtaggagcgctctccgcggcttgtctgttcaatgacataaggtactaaactcatgtatatgcctcctaactacatgttacttgtatagacttatttttcaacagcattctctatcaggaaagttatggcctcctgtactgccatatcttccttcatctgcttcttttcattctcatccatgaattctttcagtttgtctacttccatcttataactttccgccatcttagccagttcttcatccagtttttcgtcgctgatctcgatattctctgcctttgcgatcgcttccagcacaaggcgggtctcaatgcgcttgatcgcctgcggacgcagttcatccatcatcttgtcggcagtcatacccgtaaactggaagtactgctccagggaaatgccctgcgactggattctctgtgcgaaatcatcggccatctgcataacctgagtctcgatcatcggctgagggatctcatactgcgcattcttgactacagcatctacagcctggtcttcctgctttctctttccttcggaagccttctgatctttaatctttgccttaatatcagccttatattcctctaatgtatcaaattcagaaacttctgctgcgaattcatcatcaatttccggaagttcctttgccttaatctcatgaatcgtgcatttgaatactgcttctttgcctttcagatcctcggcatggtaatcttccgggaaggtaaccttgacttccatctccttctcggcctctgcgcctaccagctgttcctcgaatccaggaatgaaagagcctgatccgatggtcagaggatagttctcccctttcccgccttcgaaggctactccgtcgacaaagccttcgaagtccaggatcacttcgtccccatcctgtaccggacggtctgttacggtgattgtccttgcattcttctctgcttcttcctgaatcttggcatccacttccttctgcgtcacgcgcgtagataccttttctatctccagtcctttatactcgccaagtgtcacttccggctttgtcgcaacatcggccgtgaagatgaatggctttcctttttcgatctgtaccacattgatctgcggtcttgatacgatgtcaagttccgcttcatcataagcttctgcatatgcctttggaatcaattcatttgcagcgtcatcataaaagatctctgcgccatacatcttctcgatcatctggcgcggaacctttcctttgcggaagcctggcaatgaaatcttattcttttgcttcatatatgcactctgaagcgctttctctaaatcatcggcaggaacttcgatggtaagttttgccatgtttttctctaacttttctacctgtaaactcatttactatttcctcctgtttctatcccgcccttcggtagtcgaaaagatgggcatactacattacattcacctcagaagtataacacaaacatctgtaaatatctagccttgaatttcatctaagcgaagtatttttaagaccaggctgttcatatcatcctcatcaacggaatattcatgattcttatctgcctgcacatgcaggatgaccgtttcttcctctccatatgcagtgtcctgataggcggcgtccagcagttcgtaagcatggttgacaatatcattcaatacctgctgcgtcacctcttccgtggttccctcatagcctccctctttgatcttctgggtaatcttgatggaatcttgcgaaagagactgctggaagttaacgaatacatccgaaggctgtatggataccggcacttcgtactccctttttccggttttttccgcctttcctacatcataacgcatggtagcgaatatcttggacaccagatccgcaaactgcgccgtcttggtctcgttcatctcaatctcattggtgatattggctgccacaaagttatcgatggactgctgatactgacgcatcagagaattttccgtggcatcctccatgtaagtcctggcccttgacgtatcaccctgaaaagtcagatccagcaaagcctgcgtatatccggaggcatcaaaatccttgccgcagcccgtgacaaagagcgccagcataagaaccagcgccataatccggaatatctttttatatcttttcatacgcaatcatctcgccaatctcttttgccttgtcgcttcccgccagtacctcaatcagcttaagggcaaaatcgactgccgcgcctgcacctcgtccggtgataacattgttatccaccgtcaccggaacctttgtaatgaccgcgccctggatatcctgctccacagtaggatggcatgtgatacgcttgcccttcaaaaggccaaggttcgccagcaccgtaggacccgcacagatcgcgccgatatactttccttcttcaaaaaagtcttttacgaccctgcgcacgcctgagtgggcatccagattcagcgttcctggcatgccgcccggaagaacgatcatgtctgactccacaaaattcacctcttcaaacaggtcttctgtctgaacattgatttcatgcgccccatggaccgtgtattcttcggtaatcgaaacagtatctacatagatctgggctcttctgagcagatctaccgctgtcaaggcttcaatttcttcaaatccgtctgctaaaatcacacttacttttttcattgaaatcatcctccttaattttacatattaacaccgtttacattttgtgtaaactatattatgattgctataaatatggtacgattatccagactggaggttggaagcttatggaaatagaacgcaagtatcttgtaccaatactgcccgacaaactagaggattacccctgccgcgtcatagagcagggatatctgaatacagaacccgtcattcgtatccggcgggataacgacaagtatgaaatcacttacaaatccaaaggctccatggcaaggcaggaatataatctccctttgacccgggaagcctattaccaccttttgcccaaaatagacggacatctgattcaaaagaagcgttacatgatccctctttccggcggattgaccgctgaactggatatatttggcgggcggcttgcgcatctggtccttctggaagttgaatttcctacagaagaagatgccaatacctttatccctcccgcctggttcggggaagacgtaaccttttccggaaagttccacaacagttatctcagcacgctgtaaaagcaacgatttgtttctttttcttaaaaagaaacgtttcggtgcatagatatctatttattaggtaaattgctatactaacaagtgaaatgacttgtgggggttaacgattatgcctaatatacagctggccaataacttaagatatctaagaaaacaacataatctgacacagacgaccttaagcaatatgctgaacatttccagacaggcttactctaactatgagacaagcaagcgtaccccggatctggattcgctgcttcacctggccggattttaccacgtcagtctcaacgatcttgtccttggaagcctgaaagacaagcatgtcaccacgtcaggcatatccgaggatacgattccctatgctctcgcaacagataaaaagaccggcaattccatctatctcacggatgaagaagtagatatgattctaaatttccgcaccctttccaacgagaataaacagattattaccggctttctacattccaattccaaacatccagattaatcagccaacgcaaatccatcatgaacagctatcatggcctgctcgatgtcatcctctgcaaccagtacggtaatccggatctcggaagtagagatcatgttgatgttgacccttgagttgtacagagattcaaacatctttgccgccacgccaggattgctcatcattccggcgcctacgatggaaagttttgccaccttctcattccatgtaatatcctggatcgtaagtctctttttattttcctccagaatcctgatcgcattctccaggtcatcggatgccaccgtaaaggagatgtctttcgtcccttctcttcccactgactgaagaataatatccacattgatattgttgccagcaagggtatcaaagatacggaatgcgattcctggcttgtcttccactcctatgactgagattctggcagtattcttatcggccgccacgcctgtcactaatagtttttccatttcgcttgcctccttgactacggttccctctgagcggttcaggctggaccgtaccactaattctacgttatatttcttcgccatttccacagatcggttgtgaagcacctttgcgccaaggctagccagttccagcatctcatcataggttatcacgtctatcttctttgcatccttcacaattcttgggtctgccgtatatacgccgtccacgtctgtatagatctcgcatttatccgcgtgcagcaccgctgccagcgctaccgccgtcgtatcggagccgccccttccaagcgtcgtgatatcgtcatatttattaacgccctggaagcccgttacaattacaatcttcctggaatccagctcgtggaggatcctctccgtatccacgcgcttaaaacgcgcatttccgtagcgggatgtggaatgcatcattacctggaacgcattcagggatactgccggtacatccagagcatgcattgccattgccatcaatgatacggatacctgctcgcctgttgacagaagcatatccatctccctcttttttgccttaggattgatggcattcgccatttcgatcagattgtccgtcgtatcccccatggcagaaagcacgaccacaatgtcatgtcctgccttatagtcctcaatgcagcgctgggccacattgaagattctctccttgttggccacagaactgccgccaaatttctttactattaacatatatcctcctgcagcaagtgcccgattaattgatatccgtccggccagttcctgccggtcgcgtaagccgtcttctcattatacgcctctgggcctgcttcttctttcgtactgtcatacagaagatagggaaccggctcccctgtatgggtgcgtactttgatgggcgttggatgatctggcagaagcagaagcctgaattcttctcccgcctttctaagtccatccactacgatgcccagtacttttttatctatattttctatcgcggtaatcttatcctttacaattccctgatgtcccatctcatcgggcgcctccacgtgaatatacgcgaagtcatagccgtcttttgtcagggctgcgactgccgccatggccttcccctcgtaattagtatgcaggcctccgttggcgccttctacgatcacgcggtccatgcctgctcccaccgcgattccttttaaaaggtcaaccgccgagatcatcacgccgcgcttgccggtacgctcctcaaaggatgtcagcgccggcttctttcccgcgccccagaaccaggcggagttggccggatgtaggccctcgcttctacgctttacattgatcggatggttttccaggatgtcatagcttttcttcatcatgtcccggagtacctcgttttgcggaaggtaatccccgattctttttgcgagaatatcatgaggaggcgtcagttctaccacgttcccattcttccagatcagaagatgacggtaactggttccggcatagaaacggtagccttccctctcaagtccttctcttagggcctccagaaggatcgccgcatcctcggtactgatctcatcggaactgtggtcgatgatcgtccggtcttcatagtcgcagtcttcctccgacaacgtcacgatgttgcagcggaaagacacgtccgtctcttccatatctacgccgatgctcagcgcttctaacggagagcgtccggtataatacacctttgggtcatagcccatgactgcaaggttggccgtatcgcttcccggagccattccttccggaaccatggaggccatccccaattcggatacctccgaaaggcagtccatcacaggcgtcgccgctgcttccagcgtcgtccgcccgttcagttcctcaagaggccttcctgccatcccgtcgctaagcaataccacatatttcataaactctctcctattccttctggtcttcgatacgtatcatatgtaagatctgatccttgtagatgttggcgcgggtatcataatcgccctccatcatgacgggagtcgtaaagccgaattctccctccagtccgtcggcccttatgatcttgatatccccgaaggagtcctgaagcgccggaagcatctcctgcgcatcgcctttcattcggataaagaatctgcgcttagagtctgccttgtcttccaggtgcagcttctcctgcttccacatggtcataatattgcggttgagatgctttgcggcatctaccacgtccgcaacgaccgcgctggcagtgggaagttttcccgcgccgcttccatagaacatggcatcgcccagaacattgccgtgtacgaatatggaattgaacacgccattaacattataaagcggatgctcgggatagagcatgcaaggcgccacgatcgcatgcagacggttgcctgcatatctcttgctggaagccagcagcttgatggcggtacccatagccttggcatacttcatatcttccaccgttatttctgtgattccttcacagtagatatcttcaaagtcgacctgctggccggatatcagggaggacaggatcgcaatcttcctgcaggcatcatatccttccacatccgcctccggattgcgctctgcatacccgttggcctgcgcctctttgagcaccgtatcgtagtcagcgccttcgtagaacatcttcgtcagcatatagttggtggttccattcaagatgcctgtaatctcttcaatctcgtcagcagtgagggaagaattcagcgggcggatgatcgggattccgcctcccacgcttgcttcaaacaggaagttgatattgttctcttctgcgatggagagcagttccgcaccgtgctttgcaaccagcgccttgttggacgtggccacgctttttcctgcctgcaggcatcttttaacaaatgtataggccggctcgatgcctcccattacttccaccacgatcttaatctcatcgtcattgataatcgtctcaaaatcatggacaatcttttcctgtaccggatcctcaggaaaatccctcagatcaagcacatacttgatattcagttcatcgccgatcctctggttgatccgggcgccattcgtgtttacgacttccactactccggaaccaaccgttccgtatcccataactgctatatttaccatacgttcctccctttaactattcaccgtctgtttcaagtatgcatttataaacatgtcgatgctgccatccatgacagcgcccacattgctgttctccacattggtcctatggtcttttaccatagtatatggctgcattacataagaacggatctggttgccgaatccgatttccttaacttcgccgcggatgtcggataccttctctgcctgctcctgctccttcatcaactgaagctttactttcagcatctgcatcgctttctctttgttgtgatgctgcgagcgctcattctggcattgtaccacgatcccggtgggaagatgggtgatgcggatcgcggaggaagtcttattcacatgctgccctcctgccccgctggccctgtaagtatcaattttcaaatcatcatctgcaatttcaatgtcaatctcatcctctatatccggcaccacatcacaagatgcaaaagatgtctgccgtttgcccgccgcattaaacggcgagatgcgtaccagtctgtggactcccttttccgacttcagatatccataggcattctctccgttcacctcaaaggttaccgtcttgatgcccgcaatatccccgtccagatagtccagcacctggatcgtgaatcctttccgctctgcccagcggctgtacatccgatacagcatgctggcccagtcgcaggattcggttcctcctgccccggcgtgtatcgtaacgatggcattgcatgcatcgtactcgccggacagcagcgtctggatcctgagttcctcgtatgaggtctcaaatccccggatctcttcttctatctcgcgcgccatagaagggtcttcatcctcatatcccatctcgatcaggagattgatgtcatcgtaggaagcatacagattctggatggtctccaccagttctttgagatgcttcagctccttcatcagtttttgggattcttccggattatcccagaagcccggctcttctactttgcgctctaattcttcaatccttcttatcttgccagataagtcaaagtgaatccctcatttcagcgaggggttcatcataagcattcatgatgctcttaaactgatctaattcaaccactcaatcacctctttcatcattctatttgcgcccgcagcactgtttgtatttctttccgcttccgcatgggcatggatcattgggatagatctttttctctgttcgcttcttaggcgtatgggcagcgctttcatccttgttggtcccggtaaccttggctacctgctcccgttccaccttctgctcgatccttacgtgagccagcgtacggatcgtgtcttccgaaatgctcttggtcatctgatcaaacatgtcatatccgatcatcttatactcgaccttcggatctctctgtccatatgcctgaaggccgatgccctggcgtaattggtccatatcatcgatatgatccatccatttcgcatcaatgactttcaataggactacacgctcgatctcacgcatatgctccggctccggaaattctgattccttcgcctcataagccttcgccgcgcgttctttcagcagatgcttcaattccttctggctgaattcctttacatcctcttccgtgattggcgccatcggaatcgtattatggatggtcatattcaactctgacagattccattcatcataatcctggtccgggctggtgaccatatccaccacgttctctacatactcgttcagcatatggaagatagagtcgcgcatattctctccatccaggacgcggcgtctttcttcatatataatctccctctgctcattcatgacctggtcatattccagcagattcttacggattccaaagttgttgctttctatcttctgctgcgccttctcaatagccgtagacagcatcttatgctcgatctgctcgccttcttcaacgcccagcttcgtaaatacgtccatcagcctctcggagccgaacaggcgcatcagatcgtcttccagggaaatatagaatctggattctcccggatctccctgacgtccggaacgtccgcgcagctggttatcaatacgcctggactcatgtctctccgtaccgatgatcttaagcccgcctgctgcccttgactcgtcatccagcttgatatctgtaccacggccggccatgttagtggcgatggttactgcgtcatggacgccggcctgcgcaacgatctctgcctccatctcatggaacttggcattcagcacgttatgcctgattccgcgctttttcagcatgccgcttaagagttccgaattctcaatggtaatggtgcccaccagcaccggctgatgcctggcatgggcttcttcaatcgcatcgcagactgcccggaacttctccttctgcgtcttatataccgcatcctcaaggtctttcctgattaccggcacattggtaggaatctcgataacgtccattccgtagatctcgcggaactctttttcctcggtcagtgcggtacctgtcatacctgccttcttctcatatttattgaacagattctggaacgtgatcgttgccagcgtcttgctctctctcttaaccttcacatgctctttggcctctatcgcctggtgaagtccgtcagaatagcggcggcccggcatgatacggccggtaaactcatcgacgatcagcacttcgtcatccttaactacatagtccttgtctttgaacatcagattatgggctctgagggcaagaatgatattatgctggatctccaggttctccggatctgccaggttctcaatatggaagaacttctcaacctttatcacgccgtcttccgtcaggttgatattcttctctttctcatttacgataaagtctccggtctccgcgatgtcttctcccatgatggcattcatcttgctgaattccccgctggcttcgccgcgttccagctggcgggccaggatgtcgcaggcctcgtaaagttttgtggactttccgctctggccggatatgatcagaggagttctggcctcatcgatcagtacggagtcgacctcatcaatgatggcatatttcaggcctctttgtacaagctgctctttgtagatgaccatattgtccctcaggtaatcgaagcccagctcattgttggtgacatatgtgatgtcgcagttataagccgcacggcgctcgtcgttgtccatgctgttgagtacgacgccaacggtaaggccaaggaactcatgcacttgtcccatccactcggcatcacgcttagccagataatcattgaccgttacgatatgcacgcctttgcctgccagcgcgttcagataggccggaagggtggaaaccaaagtctttccttcaccagtcttcatctcggcgatgcgcccctggtggaggataatgccgccgatcagctgcacgcggtaatgcttcatgcccagggtacggaccgctgcttccctaaccactgcatatgcttccggaagaatgtcatccagcgtctcgccttccgccagacgcttcttgaattccctggtcttttcctttaattcactatccgtaagtttttgcatcacaggctcaagcgcctcgatcgcatccgcgataggatagattcttttcaattcattttcgctatgtgtaccaaatattttttgtatcaaactcatattgacgtatactccttgtcgctaaattagccagtctctgaccactctattcctcattctagcactatctatattccaattcaactaatttataaagtgttcacaaactgttaatctcactgtcatcaatactttgccacgatttcatagggaatattccccccaaacagatccagcgcgctgccgattgtaaagtccaggcttcctcccgaaatctcccggaaatggttcaggtcttccaggcttccgatgccgccggcataggtgatagggatgcctccctgtcttccaaggaaggagaccaggtcttcctcaatgccggaagccttcccttctacatccaccccgtgcaccaggaattcatcacagtatccggcaatgtcatccagcacctcttttgtcagcctcacccgggtaaacgtctgccagcggttggtgacgatatagtaatccccgcctttcttcctgcagcttaagtcgatcaccacatgctctcttcctactgcacagcaaagttcctccatgcaatcccaacggatctgtccgtccctgaacacataggaggttacgataacatggcttgctcccgcgtctatatattcccaggcgttatccgcggtaatccccccaccaatctgcagtcctcccggataagccgacagcgcctttagcgcctggctcctggttcgttcataataatcagaagaaggcggattcaaaagaatcacgtgccctcctttcaacccatcttccttatataaacgcgcataatagtcggcatccctggcggaagagaagttctccaccgtcctgtctccattgtccgtaaggcttcctcctacaatctgctttacctttccattatgtatatcaatacacggtctgaatctcatattgcctcctagtatcggttgtcaaaaatgcgggtggatttcttctcgcttcttggaaggtctccgattgcaaccggctttacattggtcataattccaatctttgctttaaactcctgctggatcacctttgccgccgcttttggctccacatccttgttgatttccacgaataaggtgcatacatcctttccgttcatatggtccagcatgaactgatactcgctggatgcctcttccacgccctttagcatctcttcgatctggcttggaaagatgttgacgccttttacttttaccatatcatcggtacgtccaatcaaagtatcaattcttgggaaccgggagccgcaagggcagtcgcccggaataaatctggtcaagtcatgggtcctgtaacgaatcagcggcgctccctgcttgcgcagcgttgtgatgactagttccccgatctccccgtccggaagcacttccccggtcttggggtcaacaatttcaaagtatacatagtcatcccagtaatgcatgccgcactcatagtcgcagctcatggcgattcccgggccatacacctcagtcagcccatagatatcatagagctggacgcccagttccgcggcaatccttttgcgcatcttctcgccccagcgttcggagccgatcacgcctttcttcaggcagaccttatccgtcatgtccctcttggcaatctcctctgccagaagcagcgcataagatgaggtagcacagaggaccgtggccttcatatcctgcatcatgcgcagctgcttatccgtatttcccggtcccataggaattgtcatggcccccaggtgctcggctcccagctggaatccgatgcctgccgtccataatccatagccaggcgtgatctggatacggtcaagcgccgtaatcccggccatctcataacatcttgcaaacatcttcgcccagtcgtccacgtctttctgggtataaggaatgatgatcggcgtccctgtggtcccggaagaagaatggatccttacaatttcttcgtcaggcactgcctgcagccccagcggataggcctcccttaagtctcccttccaggtaaacggcagtttttcaaaatcttcctgggtcttaatagattcaatatcaatatcctgcagcttctctttataaaagcacggctttgatgtcaataatctcaaattttccttaatcagtctgaattgtaactctgtcatccgcataagttgctcctcttatctttctttataatctcttgactgtacggcagcagcccccagttccagcgccagcacattcattttggcatactggggcttcactcgtctggcaagttccgccttcatatcctccatctggatatccagcaccttgcttcccagcgcgactcccaaaagcgccacgttaagcaccttgggggatcccgccttttggcagatggcctccccgtcaatgacatacagctgatggacatgcttcttcagatatgcgatcattgcctctccatcatagccgcctccgccaagcgtggctgtcacaggctgtacggccttctggtttactaccgctacgccgccttcctttagataaggaaggcatcttaccgcctccgcgggctcaaaagccatgatgacatctgcacatcctttcggtatcataggagaatgaatctttgttcccatcctcacgtggctgaccactgatccgcctctctgggccatcccgatggtctctgatgtacgtacatccatccccttatccatcgccgcataggcgatcagtttggaggcaagcactacgccttgccctcccactccgcataacagacaatttttattcatcatgatccacctcctgaatcgcgttaaacttgcagacctgcgcacagataccgcatccggagcacaacgacggctcgattgcggccttgccatcctcgataacgattgccgggcatcccagttcccggatgcactgcctgcaaaatgtgcaggaatccgctgacacatgatatctggcggccggtctggtgacggcaatacatggggacttgaatattacgacccttaccccggcctcatccatgacttcctttactgcctccaccgcttcgttcagattcagaggatctgccttaacgatccggcttacgccgatcccttccagtatcttctcgatactcaccttggccaccacttctcccatcatcgtctttccggttcccggatgcggctgatgcccggtcatcgctgttgtagaattatccagcacgaccagcacgatatccgtctgattatagaccgcattgatcacgcccgtaagcccggaggcaaaaaatgtagaatcgccgataaatgcaaagttcaccgtttccggctcaatgatatgaagtccttgggcgatggtcacgtccgcgcccatgcacaggcaggtatctaccatatcgaggggctttgaattgccgagggtatagcatccgatgtctccgctgaacacggcctttctacctttggcagcctgctttaccgcataaaaggaagcccggtgcgggcatccggcgcacagcaccggaggacggatgggaagcgggggcatctcttctgcggctactctctctgtctggccccatgccataaattcagggacaaagcgccccaggtcttccctgacgctttctgtgctattttcccctgcattcctggtatccccggtcaatttgcccttgatgttcacgggaagatggtatttgcccgctatcttcaaaagttccgtctcaataaccgggtccagttcttctatcaccagcacttcatccagcccttccaggaacgagactgccagatcctcgggaaacggatgcggggttcccacgcgcagaagccttatctcttccgggacggcttccctggtatatgcatagctgataccgcccgtggctatgcctttcctggaatccgccttcccttccaccgtattatacctgtaagaagaaaatacatgggacagttccacatttctcttctcgatcttcatgtggttctgataggaaagccttgggaatatcacccagcggctggtatcttttaggaagccctccggttcttttctcgttgcctcttcttttaattccaccgtcgcgcagccgtggcagacgcgggtcgtaggccttagcagaaccggtgttccgtatttttcagaatattcaaatgcatcctctaccatttcgtaggcttcctccggagaagaggggtcaaataccggaagtttggaaaatgctccaaaatgccgggtgtcctgctccgtctgggaggatatcggccccggatcatccgccgccacaatgaccatcccgccttttacgcccacataggccaggctcatcagtggatcagaagccacattcagtcccacctgcttcatggtcaccagggttcttgcccctgcataggcgccgcccgcagccacttccagggctgccttctcattgacggaccattctatatgtatccttccatcatcattatgcctggcaaccgtctccagtatctccgtagacggcgtcccggggtagcccgacacaaggctcactcccgcatggatggcgccaagcccgattgcttcatttcccatcagtagttctttcgccatatgtattctcctcacattaaaatatattcctatcgggatattttatcatagtaaagcaagaaagtccagagtttcatatgtctgacgcactgcgaaaagaaagcagccggcagagatacccgccggctgctttcaacttgcataaatgaccgttttaaatgctatcggttcgtattgtttgtagcatcatctgctttgtttcttgcattgtcatctgcgttattgcggtcattgtccccgtcaaggctgtcctttacatcattagcgccgtcacggatgtcatctccgatctcgtcggtaacgctattggtatcgcctgtgccgtcggtagcatcattggtgttggtatcattggccttaccggtattgtcggttgtcgtagtgttattcgtagcgccgttatcatcggcattcttgtcattgccacaggcagtaaggcccatgattactccggtgcacatcaggataagcattaatttcttgaactgtttcatgttaaatctccctttcatgtataattatcttaatcaagtatcacttgttgctagtaatatctgcaaattacgataatttataccttcccccaaatggaagtttttaacacggcctcctgtatgcactttcttaaatacgctccgcaatccgtccgcttctgtaagccataagcagcgcttccagatcttcaatctgctcttttaagtcctttccaatgtccgtatctcccaccagtttgcggatggccacccgttttacgatggtgctgtccgaatggatatcgctttccttttctatggcggcctccgtagattcaaaaggctcatgggctgcaaggatcaatccgtaggaattgtagatcagcgtataccccgcaattcccgtctccttctggtatgccctggaaaatcctccatcaatgaccaggactttcccgttacatttgatcgggttctccccattcttgctttttaccggcacatggccattgatgatgtgggttccctcttccggcagtccgaattcttttaagattccattgattactttttcattttccaggagacaataataaggatttttcttctccttgtgggtttccttgtcagccagaaaataacgctcgaatgtagccatcttgtctttaccgaacagcggggaattctcgctgagccagatataccacatcatatccttgccccgctccttttcctttggatccacggcatagaagccctttctcacataactttccagaatctcgtacaggctctttcctttataagagcgtccatagatgcgaaccgtcttcaggcttccgtcatctttgagcggcacgcagccatgatagagaagattattattgtagactttgtaaagtcctcccttgctcaaaaggaaacgcatatggcgctgcagcttctcgcagtttaagaaggcccgctccagccggtccattacgtcttcctcttccttggtaagggcatagggcttcttaggatcgatggtagggaaatttttatccagcagttcgtaagtctgtccgtctatctctattgttcccttttcatagtcgatatgatgcaggagatttctgctttccatcttgaatcccggattctttttgatgatctggccttccaccttaaactgtatgatggacatcgccttgtgcatcttgatatccagaagcatctccgtctggctgtaattcggctctccctttaactggaagcattcgcagggatcgtccccatatgtagccatggcaaatgtggccagcggcagcagattgattccgtatccttcttccagaatatccaggttcccataccgggcgcagatgcggatcacattggcgatgcatcccctctggcctgcggcagcacccatccacagcacgtcatgattgccccactggatatccacagagtgatgctccatcagtttttccatgataatatgcggtccgggccctctatcatagatatctcctacgatatgcagatgatctacggtaagcctctggatcagctcgcttagagccacgataaactcttccgcccggccgatccggataatcgtgcttactatagcattgtagtaagactccttatccgtcatctccgccttttccgtaatcagttcttcaatcacataggcaaaatccggcggcagagcttttcttactttggaccgggtatatttgcttgcagcgcacttgcatacttcaatcaggcggtacagcgtaatcttataccagtcctcaatgttcttctcttccttcttgatcctgtccatcttctccctcgggtaataaataagagtagcaaggccctgcttatccctgctactcatagtattcccgaagacatcatcgattttacggcgcactgaaccagagccattcttaaggacatgagaaaaagcctcatattctccatgaatatccgtaagaaaatgctctgtgcctttcggcaaattcagaattgcctgcaagttaataatctctgtcgatgctttcgcgatggtcggatacaattgagaaagcctttccaggtaacgtacgtctaactctttcataacatcctcccactaaatgttttatataatacagttcctcccttagaactggattacatcggacatatcgtatcttccggccggtttccccgccaggaacttggcggcctccacggcccctttgccaaatacggtcttagaatatgccgtatgcttgaactcgatcacctcatccgctcccgcgtaaatgacttcgtgatcccccacgatggtgccgccgcgtaccgcagagattccgatctccttgctgtcacgcttcttgcgtacctggctcctgtcatatacataggaatacgcattgcccatggactcattgatagaatccgccagtgccagagccgtcccgctgggcgcatccaccttctggttgtgatgcctttccaccagttcgatatcgaatccggcaggtgccagcaccttggtggcatcttgaagaagcttcaggagcagattgatccccagggacatattggcagacttaagtaccgctaccttctttgccgcttcatctaccttcgccagctgctcctctgataatccggtggtgcaaagaacaaccgggatctgcctgtctgcgcaaaagtccagaagccgatccgccgccgcagagttggagaaatcaatgatcacatctgcctttacatcacatttttctatactctcaaataccgggtagtcattggtgattcccgtatatgtatcaatgcccgctacgatttctatcgcttcgtccgcttttataaggccggtgattacctgtcccatcttgccattacagccatgcataattgcctttaccatatcttgagtcctcctttatcctgttataaaaatgtacaagaaaaggatatcatatccgccgcttggactcaacctatgatatccttttcacatattttcctacctatatctataccagctgaatgccaaaatccttcatggcctgcgccagtgattgctcgtgttccgcagtcagttctgtcaaaggcatacgaagcggtccgcagtccattcccatgaacttcatagccctctttaccggaatcggattcacctcgcagaaaagacggtcaatcagagggactgccttcaactgcagttttgcgcttccttctatatcgccttcaaagaactttgcacagatatcgtgggtttcctttggggcaacattggccagcacggagatcacgccgattccgcctagtgacagtaacggcacgatctggtcgtcatttcccgaatacaggtcgatattgccgtccgtcatggacataatctttgcaatctgagaaatatttcccgaagcctctttgacacccacaatattatccacattctttaccagcgcagccacagtagccggctcaatattacatcccgtacggcttgcaacgctgtacatgatgatcggcgcctttgcctcctttgccactgtggtaaagtgggcgatcaagccttcctgtgtcgctttattatagtaaggcgttaccaccagaagtccatctgcgccgttctctgccgcttctttagacatgtcgatggccgttctcgtacagttcgaaccggttcccgcaaccacaggaattcttttcctggtgcgctcaatggcaaacttcacgcaatccatgtgctcctcttctgtcatcgtggctgactccccggtagtaccacatataataatactatctgttccattctcacagtgatagtcaatcagttcatccagtttatcgtaatcaatacttccatcttccttaaacggcgtgacgatagccaccccagatcccttgaatatagccataattttcctcctgactttcatagacatactaactttatcacactactcatatattgaaatattatcaccaattaaatatgatgtcaatgaaagtctcaggcagaatttccgccacagagactctattcctccaggcattccagtttgctgacagacacctcataagcgattctcttctccgtctctgtctctgtaagtttctttatgtattccctgctctggatccttcccataatctggacatgctcgcccacttcgaatgtcgacgcgaatcttgcgtttctgccccagcagatgcatggtatgtagtctgatttgccatatggcctgttaactgccagcaaaaggtccgcgatctctcttccaagcggcgtcttgcggtataccggcaatttgcagatatagccgtccaggaatatgttgttagtcttcgccccgtccagctcctcttctataaaagacacttctcttacgaatacggataatacaagtctgttcttttgttcatcgtgtctgttataagagcggaactgcccgcttaccataatgaactctccggtgtagtcctgagacacatcgatgagccgttccgatatcataagcggaatcctgtcttcggaattgctgaggcgctttacgttaacgtccatcatataaaagccttctccaaacacttcgtggctgaacgtaaacggcgatgcgacttcccccataatggttacctggttgttttcaatgatcttatctgacataattttacaatctcccttcctctgaatcgtattttgagtcattacatagtctatgagtcaagattccattttagaactaaatacttgtaaattttgaaaaatgtgataaactaatgaagttgtatattttaataggtagagaaaaggaagatttgtatgaagacaaaacgtgaagacattcgtaatatagccattatcgcccatgttgaccatggaaagacgacgttggtagatgaattattaaaacaaagcggcgtattccgcgagaatcaggaagtagaagaacgcgtcatggactccaatgacatcgagcgagagcgcggcattaccatcctgtcgaaaaacactgccgtatactataaagatacgaagatcaacattattgacactcccggacacgccgacttcggcggggaagtagaacgcgtccttaagatggtaaacggcgtcatcctcgtggtggatgctttcgagggcgccatgcctcagaccaagttcgtactgcgcaaggcactggatctgaatctcccggtcatcgtctgcatcaataagattgaccgtccggaagccaggcctgatgaagtcattgatgaggttctggaattattcatggacctggatgcctccgatgaccagctggactgtccttttatatacgcttctgccaaatccggaattgcagtcttagatctgacggatgaagaaaaggacatgcagcctctctttgagacgatcctggaatatattccggcgccggaaggcgacccggacgcttccactcaggtattgatcagcaccatcgactacaatgagtatgtaggccgtatcggcgtaggaaaggtagacaacggcacgattaaagtgggaatggatgcaatcgttgtcaatgagcataatcccgatcgtcaggaaaaagtccgcatcaacaaactctatgaattcgacggcctgaataagatagatgtaaaggaagcttccatcggctccatcgttgccatctccggaattgccgatatctccatcggggataccatctgctctccggaagagccaaaggcgattccattccagaagatctcagagccgactatcgcgatacagtttatcgtaaatgacagtccttttgccggccaggagggaaaatacgttacctcccggcatctgcgcgaccgcctgttccgggaattgaacacggatgtaagcctccgtgtagaagaatccgacagcaccgacagtttcaaagtgtccggccgtggcgagctgcatctgtccgtcctgatcgagaacatgcgccgggaagggtatgaattcgcggtcagcaaggcggaagtcctgtataaaaaggatgaacacggcaaattattagaaccaatggaagctgcatatattgatgtgccggatgaatttaccggaaccgtcattgacaagttaagccagagaaagggagaactgcagggcatgggaaccacaggcggcggctataccagattagagttcaagattccttcccgtggactcatcggctaccggggagaatttctcaccgataccaaggggaatggaatcatgaataccgcatttgacgggtatgcgccttataaaggggatatccagtaccgcaagcaaggctccctcattgctttcgaaactggcgagtccgtaacctatggcttatacagcgcccaggaacgaggcgtgctcttcattggaccaggcgaaaaggtatattccggaatggtaatcggtgaaaatgccaagacggatgatattgaagtgaacgtctgcaagaccaagcatctgaccaacacgcgttcatccagcgccgatgaagcgctgcgtctgactacgcctaaggtcttaagcctggaagaagcgctggacttcatcgacaccgacgagttattggaagtaacccctgagaatctaaggatccgcaagaaaatcctggatccgaaaatgagaaaaagaggaaataaataatgacatttttatggctgttagaaggaatccggactcccttcttagaccaactgatgcaattcatcacatattttggccaggaaatcatcatcatagcggttatctgtgcactgtactggtgcgcggataagcgctttgcttatctgcttggctttacttattttacggccggactgtgcgtgcagtccttaaagatcaccttccgtatcccaagaccctgggtgctgaatcctgacttccatgcggtagaaagcgccatccccggcgccacaggctactcttttcccagcgggcatacgcagggcgctacctgcctgttcttccctctggcgctaaaaacaaggaagttctggacaaagtttctgtgtatattggcattcctttccattggattttccaggatgtacttgggctgccacacgcccaaagacgtgcttgcatccatgggtatctctcttctggtatctgcccttatctggcacttccaggtttttttcctggatgatgcaaggcacttgaaactgatcgccgctatcctggctggcctttccctggctgttgccgcctattccctgatcctgatgggaaatggcacgattgaagtcaaatatgcagcagactgctgcaaggccgccggagcaggacttgggtttgccatcggctggtacgtagaacgtacccgtctgaattttgacacccgcactgggaatatctggtcccaaatattgaaactggccgctggtttagcggctgcgctcataatcaaagaaggcttttcgcttctcttcggaagttctatcttggcaaaaatgatggaatatcttatactggtgttgtgggtattggtaatctacccttatctattcagtaaactattgaggagaaatgtatgagacactatgtaacgatctttttgaaacggctggccgtagtactggaattcgtcatttccatcatgctggccatcggtatcgtcctgctgtgccttcgcatggctacttctttaagcagcatccctaatctggatgtctggcctaattatgatgacctgctggaaacctgcttcaacctgattatcggcgttgaattaatacggatgatgtattcccatacgccaagcacggtattcgaggttctgctttttgcgatcgcccgccagatcatcgtagaccactcttctatctggagcagcctggtgggcgtatgcgccattgccgtactttttgccaccagaaaattcctgttctgcgaatttgacatatccgatgaaatcatatttagggcaagcaccagaatcaagaccgtcaataaaatactgggcattgacattccctacgatggcgcaaaaaccctgtacgagattataacgaaaaagttcgaagaatatgaaatcgagactggcgtaggcgcctgcgtatacttttctgactgcggcctcagggttgccaagatgcatgatggaaaaatttcaagaattgaggtgatacgtgctatacattaatgtccaaacatgatatactacatatatcagatagatcatcggtctggatattaattgtcagactttatcttctgaaattatgtcgaaaaggagttgggcatcatgaagtttatcattatcggaaagaacatcgatgtaacacccggcttaaaagaagccgtagaaaacaagttaggaaagttagagaggtactttactcctgatacggaaatccacgtaaccttaagcgtacagagagaacgccagaaaatcgaagtaaccatccccgtaaagggcggcattatacgttccgagcaggaaagcagcgatatgtatgtatccatcgatctggttgaagaggtaattgagcgtcagcttcgcaaatataagaacaagttaattgcaaggcaccaggaaggaagtggcaatttcaagcaggaattctttgacagtggcgagcgttccgaagatgatggcgagattaagatcgtccgcaccaaaaaattcggattcaagccaatgtatccggaagatgcctgcgtacagatggaacttctaggacatgatttctttgtattctgcaatgcagagaccgatgaagtaaatgttgtatacagaaggaaaaatggaacgttcggcctgatcgagcctgaattttcctaaaattccaaacattatattctaaataataatattcaggggatgtcccctcctatggttgacccgtaggaggggacatcccttttcttgtcctcctgatgaaaaaatcttctttttctcaaaataaaacagaaaaattattcagtccctgtctaaatcatcaaaaaaaagtaacttttttcattttttttagaagaatttttcaatagaattacagaaaagcaagccaatgataaaggaggaaaccacatgaaagatattatgaaaattgccaacagcattcccatgtggattgcgtgcggcacggctgtcatcctggtaatcgtccaggctgttattttcgcaaagtcttcatataaggcaggcgaaaaaatcggactcaccaaaaagcagatgcgcggagctatcagaagcagcgcgattacttcgatcgggccttccatcgttatcctgagtggaatgctgtctcttctcattacagtcggcggcccgatggcctggatgcgcctgtccatgatcggctcagtcatgtttgaatccatggctgccgggttcggaaccagttccgtcggcgttcagctaggcgcagatgctatgaccgaacttgcctttggtatggccgtatggacaatgattcttggttccattggatgggtcatcgtctctacattttccgcgagccgtatggataaagtagagaagaaactatccggaggggatccaaagatgctaacagccatatctggcgcagcaatcctgggtgctttctgcgccctctcctcttctcaccttacaaagttaaataagaactccattgcctgcgtgcttggtgccgggattatggcagtccttttgatactgggtgaaaaaaagaatattaaatggcttggagaatgggcgctgaccatctcgattctcggcagcatgattataacagcgattatataaggaggtaccacatggataaaaaagatttatattttgaaaaagagtatatgcctcacatgaaccggattggcaagatcactggatacttaggcgtgctgctttcattcgcgccggccttcatcctggccgtagtatatggaatatttccaaagccggctgcccttctaactgctttcgtatctattgcaagcgctgtaggcgtgttatggtttgttgagcccatttcctattttacgatcctgggacccgtaggcacttatatggcctttctatcaggaaacatatccaatatgcggctgccctgcgcaagcatggctcaaatatcggctgatgtggagcccggcacaaaggaaggctccattatatcgactctgggaatggcggtctccatcgttgtcaatgtctccgtgctgacaatcggagtcattctcgggagttccgtcttatccatgcttccctccaaggtcacggaagccctgaattatttgcttcctgcactgtttggcgctttgctggtacaatttggcatgaagcaaaaaaaactcgcgctgacagtccttatctttgcgttgatcatctgcacggcgattgacgctggcttatttaactggcttcccggctcaagcaattatcttgggattctatcttgtgtattcttaagcattgtagtatcggtaatcacttataaaaaaagtaaagcatccagaagcgccgaataggaggaatttattatgacaaaacagaatctgttccgcaccaccgatgaacttgctccactatgcagttccatgtgcaaaaaactctgggaaaatccggaatgcgggggatatgaaaaagaatctgccgattatctgagaggcattctaagggatgagggcttcataatcgtaaatgaagaaaaactaaagcacgcattctatgcagaatatggaagcggcaagcctgtcattgccatacttggcgaatacgacgctctgccaggcctttcccaaaaagttgtcgcccacaaagagcctgctgcaaaaggcaaagccggccaggcctgcgggcataatctgcttggcagtggttctgccacggcagcaatcgctttgaagcgttatctggaagaagaagaagtctccggtacgatccgtttctatggctgtcccgaagaggaattattaagtggaaaagtcaagatggcctactttcatatgtttcatggctgtgacctggcaatcagctggcatcccatgtgcgcaactgtcgtttatgacgaggggtatcttgccaacgcatccgtcaaattccacttcaaaggaaagacttcccatgctgcctttgctccggaacgcgggcgaagcgcgctggatgcggtcgaactgatgaatgtagccagcaactatctaagggagcatatcattgacaaggcgcggatccactacactactgacagcggcgggcttcctcccaatgtggttccggatcatgccagttcctggtattttgcaagagctccttacatgagccaggtaagggatatccttcgacgattggaactgaatgcacggggcgcagccatgatgacagaaacggaagtgactgtggagaagggcattggctgctatgagatgaggtgcaatcatgcttttgcagaccttacccacaaaaatatggaagaagttggcgcattggaatatacggaagaagaaaaggaatttgccggaaaactgcaggaaactgttgatgaagccaccctaagttcagagcagaagctatacggcgagcgcgaggaggcattagcctccgggatctacccgagagacttctggaagcaggccacgcttaacggctcctccgacagcggcgatattagccagataatgccgatgaatatgtttactactccttgctggcccatcggatgcgccccgcatacttggcaggccgcggccagcacaggcagttccataggagcaaagggcgctctacatgcggcaaagatcattgtcggaatcgtctatgatcttcttaatgatccggaagccacagaaaaaatcatgcaggaattcaggcagttggaagataatggctatcagcccatgttcgaagaataatcaaaaaataacggcctcagccgcaaatcatacggtctcttgacagccatcgggccggatgatacactttaaccatgtaaagtggaacaggatatgatgaatggaataaggaggaagaactatgggaatcgcgatacaggatctgcttgcacttgaattttttaaagacttttacgttgtcgccggtaaaagaggcttgggcaaagagattcaaggcgttaccgtattagatgctcctgattccttttactggacaaaaggcaaggaactgattctctctaatggatatgtacttttgcaggaacctgagtgtcttcgaaaggggttccgggatggcgtgcttcagaaatgttctggcatgatgcttaagcgcgagcgctatctggaaaagattccggatgatatctgccagttattcgatcaatataatattcctctgatcagcatgcccttttatgttccatacatggatattatgaatcaggtgaatacagcggtcatgaatcgtacgatccgaaggttcagaatcaacagtagcagttcattctccttatccaacctgacttataaagagcggaaaatcaaaagaatccttcagatggtagaagcagagatgcatttccccgcgcttctttatgatatcaatgaaaaaaccagtttctacagttccgcaaattttcgcaagatttcggaagggtacggtctgcaggatacggactactgggagccgtcccagacatttaccaggcacacattgtgtgactacatccagatggcccgctatcgtctggtaagaccatccgaggaatcggatgcacgcgtcagctggatattgattccaatctctgtaaataacatagaccaggcatactttgttgtcatggaatcccgggaactgctggattattatgatgaatattccattcgtattgcatatctcctgctgcaggctgtctatgaacaaattatcgtagcacagaatataggaaatatagggttcgagaatctggttcattatattctggattatcatgacccagatccggaaaaattggtctatcaggccaatatccagggaatatccttatcatccagttacatttacgtcgtattccgccagcatagaccagagttttcccttcgcgagaaaaggaaaccatttatggaactgttttccaaaacgaaactgtccgcgctcgcgagaatggtcttccttgatgaaaatgaaggggctttcttaatccggcagcattcagatcaaaacttgaatctagtcaagatcaaaggcctgctcaaaggtttccgccaaaaagttatggaactgtatccggaagcggatctgtacttcggcgtaataatcaagcctggaatcctcttggaattaaaggagagcatagcgaaatgcagaaaactgataaatatgggccagtacttatgcccagatgactttatatgggattatgatagcctggggcctctgacctggcttcaaataccggagaaagaactggaggacttgctaggcacatatcgcctgcttctaaaagatgaaaagaatgcagaactactcaggacattaaaggtatatctggaaaacaacatgaattacagccttactgccgagaaattatatgtacatatcaataccatacgtaacaggattgataaagtaaaccaattactgggcatcgattgggattcccctctcaacagaatgaaatgtgagattttgcttcaatatttaaagctttgatacatgtccgtattcctgggtactgatggggagcatagcctccccttatttttatacttgatccagaattacaatctctccctgcacttctgcaaaatagcactgctctccttcttccattcctgcctgcccattggttccctcgcgtatctcggccttgacggcttccaggacatcgagaggtaccagcgcggctatttccaccttatccgtatagatagaatccagtatctttatgcccctctgccccaaaatatactggattttccccaatcccgcataatccgtggcaagccgaagtttaactccgggatttttggttataatcactgatgaggccaaaccttgtttggctgcagctgaataggcacggaccagcccgccggtaccaagcagcgtccctccaaaatatctcgttaccactatggcagcattatgaatctcctctccaatgagaacatccagcatgggctttcccgcggtacctccgggctcaccgtcatcgctgtacctttgcagttcatgattctctccaatgacataggcatagcagttatgcgtggcattccagtacttcttcttcattgcctcgacgaacttaagcgcctcttcttccgaatggaccggtaccacagtagcgataaagcgggatttcttctcaacgatctcgccctcgccgcctttgtataccgtcttatattgtgatagcatatggtcaccctttcatacaatacatagtcgttatacctattactataccgaatttcttaagattttcctactgaaatatgaagttttcatttttttctttattaaagcctgtttatttgctataatgacttggtatgaaggaggcctgaactcatgaattatggtaagaaaaaagcttctcaaaagcagaaaaaaataacgtcgaaatctgccatgcagggaaaaagagtcggcgtacggcttttcaaggcatttctactctgtcttgtagttgtggccgttatcggagtaattggcggcggcattttcgtcaagaagatcattgccgatactccagacgtgtctccgtctgacgtaaagccaaaagggtttactacttttgtctatgccgatgatggttccaccgagattgaacgtttcgtatcttctggttcaaaccgtgtatataagtctattgacgagatacctaaggatttgcagcatgcatttgtagcaatcgaagacgaacgtttctacgaccacaatggtattgatcttcaaggtatcgcccgtgccgcagttgtaggaataacttccggagatttctccgaaggcgcgagtaccattacacagcagttgattaagaataatgtatttccgaatttcaccaaagaaaagactttctatgacaggctgcagagaaaacttcaggagcagtaccttgcactgcagattgaaaaacagatggacaaggatgagatcctggaaagttatatgaacaccatcaacctgggccagaattccttgggcgtacaggctgccgccaagagatacttcaacaaagacgtatctgaactgacactgtcagagtgtgcggttattgcaggtattacccagaatccgacagaatacaatccgattaccaatccggaggacaaccagaaacgccggaacaaggttctgaaaaatatgctggagcagggatacattaagcaggcccagtatgatgaagctatggcggacgatgtatacgccaggatccagacggtcaacagcacagccggcgaagaaagcccatacagttacttcgtggatgccctggcagaacaggtcatgaaggatctgcgcgagcaactgggatatacggagacccaggcctataatgccgtatacagcggaggcttgagcatctactccacccagaatatgggaatccagcagatctgtgatgaagagatgaatgatgacgccaactatcctggcctgaaagaatacggcctggattatgccctcaccgttacaagggcggatggttcggtagagaactacagttccggccacattaagcaatatgttaagaatacctatggcaaggagcagggacttctgtattccagcgaggaggaagcacgtgccatggtggaagaatggaagacgacgattgcccaggagggggatgcctatgacgaggtcatcaatatcactccacagcctcaggccgcggtcacgattatcgaccagtcaaccggccagatcaaagccatggtaggcgggcgcggagccaagtccacaagtcttggattgaaccgtgcctatggaaccggcaagacaggttccaagaggcagcccggatcctgctttaagatactggcatcctacgcgccggcactggatgcctgcggtaagacgctggccaccgtcatcgaagatgagccttacacattgaaaggtggacaggttcttagaaatgcagatggcaattaccgtggacccgttacgatccgcaatgccattgccaaatccgtcaacgtgtgcgcagtaaagctcagcgacgagattacccaggaattaggctttgagtattgcgagaaatttggcatttcgacccttgtaaaaagcaaggaaattaatggcggcatctacagcgaccttagccagactctggctcttggaggcatcactgacggcgtttacaattacgagatgtgcgctgcctatgctacgatcgccaatggcggcgtatacaatacgcctactctgtatacgaagattctggatcacgatggcaatgtgctgctggaaggaaccggcgaaaagcgtacggttcttaaggacagcaccgctgctcttctgaccagcgcgatgcagacagttgtagaatccggtacaggtacagcatgccagctgccgaacatgccggttgcaggcaagactggtacgaccacttccaataaggacttgtggttctgcggcttcaccccatactacacatgcgcagtatggggcggctacgatgataacaaagaatgcaactatgatacgaacttccggttccgcctgtggaaaggcatcatgagcagggtacacgagaacctggagccgaaagagttcgcaatgccatcctcggtagagcagaaaaccgtatgctccattaccggaaaacttgcagttgcaggcaactgcccggcaatcactgagtatttcgcaaccgacacagctccgacagaaagctgtccgggccacggcagtaccggcggcaatacggatgatgaaaagacggatgatccggatagcggaacaactacgccgaccacgccaaccgatccgaactccggcggcacgactcctcctaacggcggtggtggtggcggtaatactccaacacctactcctcctgacggcggtggtggtggcggtgatacgccaacacctactcctcctgacggcggcggtggtggcggcgagggtggcactactcagtaattacgaattagcaataaagaaagaaaaaatcagcagaatcccaaacgattctgctgattttattttcttatatgattccaattctgaactttctgccacaatctatagaatcaatttagccgctccacagattcccgcgtcatttcccagcgtcgccagcaccagcctggtatcttcattggcaaaaaatgcccgttccttgaacgctttctccacatacttaagcaggatatccccggcctttgatactcccccgccaatcacgatgacggaaggatctgtgatcgctgccagattagccagcgcgtgtcccagatatgtgccgaactcttccacgatctcttctgcaatcttatctccctttttcagttcatcaaacacggccttggcactaagtttacggtccctgagggaagaaggcgcatcatctgccttcaggcgttttcccgccagcctggtgattccagtggcggaagcgtattgttcgaggcatccccggttgccgcatccgcaatgatcctcctcttcatagttgacgcagatatgtccaatctctccgcccgctccgtgggcgcccaccacgggctgtccattcacgatgactccgccgcccacgccggttcccagcgtgaccatgatcagatttttctctcctttgcctgcgcccagccacatctcgcctaacgcagccatgttggcatcgttgcccaccgcaaccttcatctgcgtcaggtcttccatctccttgcggacttccttatatccccatccaaggtttgccgtattctggacaatgccctcggcatttacaggggcaggaatgccaatcccgatgcccgacacctgctcctttcccagtttcttttcctccatcttctgattcaaggaatcagctacatccggaaggatcgcctcgccttcctgctcggttcgggtcttaatctcccacttttccaatagttttccttcaatcgtaaagagacccatcttgactgtggttcctccgatatcaactccaaaacaatactccattcctgcatatcctcctatttctttgccagattctgctgtacgcgcttatacagttcctgggccgcgttgtaccccatcttcttctgcctgtggttaatagctgctgtctcgacaatgattgccagattacgtcccggccggatcggcagctggtgacatacgaccttgttgccaaggaactctgtatactcttcttccagtcccagacggtcatattccttctcccggttccaatcttccagcgtaatgaccagatcaatattctgggtctctcttacgctctgtacgccaaacagggtctttacatccacgatgccaattccccttaattcaataaagtgccttgtaatatccggagcagagcccaccagcgtctcgtcgctgaccttgcggatttctacgacgtcgtcactgacaagacgatgtcctctcttaatcagttccagggccgcctcgctcttgccaattccactctctcccataatcaggacgcctacgccgtacacgtccaccagaactccgtggatggaaatgcagggggccagcgctacattcagccagcggatgatttctgccgtaaattccgaagtctgcttctccgttataaacaccggcacattggcccttgtcgctttctcaaggagcattggctccggcggaagattccggcagaagataatgcaaggaatctgataggacaacaatgtctcataagtctcttccttcgtcttctcgtccatcttctccaggaatgtatactcaacatacccgataatctgaacacgttccgaatcaaaatgctcgaagaacccggtaagctgcagggccggcctgttgatatccggaacctccaccttcttctccgtcagatccacatccggggtaagattcttgagattcatcttctctacaaccttctttaatccaactttattagccatagcactctccttcataacacttaatttgtacaaaataactgtgtttattatatcatatcaatggaaaaagttatatacgtccctcgctgatttttcattcatggacggtaactccttcaactgctccaccgtagcattcttgatggcctcgatattctcaaaatggcgcatcagatctttccttctcgccggtcctactcccgggatgtcatccagaatcgaatgcacctgtccctggctgcgcaactgcctgtggaatgtaatcgcgaatcgatgggcctcgtcctggattctggtaatcagcttaaaactctcagaatccttatcaatgctgatttcctcattctggtaatacagccctctggttctgtggctgtcatcttttaccatgccgcagacggggatattaagacgaagtttatccagtacccgaagcgccacattcacctgtccttttcctccatccattagtatcagatccggaaacagggtaaatcctcccatctcctttccttcttccttttctctgagtccatgctcaaaacgcctggtcaggacttctttcatgctagcataatcatctgccccctgcacccctttaatcttaaacttccggtaatcattgcgtttgggccttcctttttcatataccaccatggaacctactgactcaaagccattggtattggaaatatcgtatgcctccatcctcacgattccggtaagccctagcagtttctccagttcctttaccgcgccgatggttcttccttcctcccgcttcagtctttctttatccgtactcagaaccagctgcgcatttttttttgccagttccactaatttttccttggttcctttcttgggcacgatcagtcgtacccggtgtccccgtctctttgtaagccattcctcaataactgccagatcttcaatctcctccggaagcatcaggcggggcgggatatatggcgtccctgcgtagaactgcttgatgaagctggagagaatctcgctctgcgtctctccctttgcaatcttgagatagaaatgatcccttccgatcagcctgcccccacgaatgaagaatacctgcaccaccgcttcttcctcttccaccgccacagcaagtatatccctatcctcccctgccgtgtccgtaatcttctgcttctgggcgatcttctggacgctcgtcagaagttccctgtattcaatcgccttctcgaactccagcgcttccgaagcttcctccatcttctcttccagttcttttaagataatgtcataattcccattgagaaaatggatcacctcattgacagattcccggtactctacctgggatatgtatccctggcagggcgccttgcactggtgaatgtgataattcaggcaaggacgctctttgccgatatcccggggaagtttccgattacagctacggatctggtataatttgcggatcagctcgatggtatccttcactgcccctgcgctggtataagggccaaaatacttagacttatccttcaccatctttcttgccagcatgactcttggaaacggctcttccaccgtcaccttgataaacggataggccttgtcgtccatcagcatagtattatacttaggcctgtactccttaataagattacactccagcacaagggcttccagttcggaatcggtcacaatatactcgaacctgcggatatgggtcaccatctgctcaatcttggctcctttgttcctgctgctttgaaaatactgccgcacacgattcttcaaactgatcgcctttcccacatagatgatgttgtctttctcatcatgcatgatatatacgccgggctttcccggcaatttctttaattcttcctgaatgtcaaacatgtcgtctccctcagcaaaaaaccagaagaaatccgcctgctcctggcagatcttcctctggttccatacgataatctattcttcctcctgtgcctcgccgtcagccgcaagagcaggactgctctcatctaccggattcatagcaatacgctcctcagacttcttggcagactccggatcgatcccttccacttcgtggaagatattcatgaactccttgcctgtgattgtttctttctcgatcaggaatgcggcaatcttatccagagagcctctatgctggcttagcagtctcttggcttcttcataggcatccttcagcatcttcatgacttcctggtcaatctcggaagccgtctcctgcccgcagttgctcacaggccttccgtccagataacggttttggatggattccaggccgatcaggccgaatttctcgctcatgccatactgggtgatcatggctctggcaacgttggtagccttctcaatatcattggccgccccggtagtgacggtgtcaaacacgatctcttccgccgcgcgtcctgccagcattcccacaagcatcgcctgcagttccttcttcgtattcagaaatttctcttcctccggcgtctgcatgacgtatccaagagcgcccatggttcttgggacaatcgtaatcttctgtaccggctcggcgtctttttgaagcgcgcttaccagcgcatgtccaacctcatggtaagatacgatccttctctcctcctggctcataatccggtccttcttttccttgcccaccaggactacttctacagcctcgaacagatctgcctgggaaactgccttccttccattcttaacggcattgattgccgcctcattgatcatattggccagatcagagcctaccgcgccggaagttgccagcgcaatggcttccaaatcaaccgtctcgtccatccgcacatctttggaatgaacctttaatacatcgactcttcccttaagatcaggcttctccacaatgatacgcctgtcaaaacgtcccggacgcagaagcgccggatccagaatctcagggcggttggtggctgccaaaagcacaaggcctttattgctctcaaaaccatccatctctgccagcagctggttcagagtctgctccctctcatcgttgcttcccagctggttgtcacggctcttgccgatcgcgtcgatctcatcgataaatatgatgcatggcgccatctgctgcgcctgcttgaacaagtcacgcaccctggaagcaccgacgcccacatacatctcgacaaaggccgatccgctcaaggagaagaacggtaccttcgcctcgcctgccactgcctttgcaagcagcgtctttccggttccgggaggtcctaccagcagcgcgccttttggaagcttggctcctacgctggtatattttcccggattatgaaggaaatccaccacttcctggagggattcctttgcctcgtcctgaccggctacatccttgaatgtaacgccggtctgcttctctacatacatcttggcgttgcttttgccaacgcccatcattccgccgcctttagacatcctcctggtcatccagacaatcatgcccaccaatagcgcgatcggaaggaatgtaaagataatctgggccactacggcagaagtagtatccggtatctcctgctcatacttgacgccagcttcgtacagtttgtcggatagggtatcatcctttacaacgccggtataatattgcttggctggcctattatcaccctttgccttcttctgggttatcacgatcttgtcgttctggattacgactttttctactttgcctttatccaccatcttcaggaactcatcataactgacttccttatcccctgtcatcccctgaaattgatagagggccagcaccaggatggtggtaattaacgttaccaatataataaaagataagccttgcttattatttttattatttttgtttttgttattctggttgtccattttattcctcctgtattacccttccattatacggacagcctacttagaaatcaataaaaacattatgaaaagattgtaaacttcctatatcttgtagtatacttggtgttgaaatgcttatacttcaaataaacgatttcaatagaaaagtaagaggaaagtgtacatatgagaattggatttgacaatgaaaaataccttcagatgcagtcttcccatatccgggagcgtatcgatcaatttgacaacaagctttatcttgaattcggcggcaaactcttcgatgattaccatgcttccagggttcttccgggattccagcctgacagcaagcttcggatgctcaagcagctttccgaccaggccgagattgtcattgtaataagtgcggaagatattgaaaagaataaggtacgcggggatcttggaataacctatgactccgatgtacttcggctgatgggcgtataccgcgagcacggcctctatgtaggcagcgtcgtcattaccaagttcagcggccaggaaagcgcggccctgtttaagaaccgcctggaaaaactgggcatcaaggtgtaccggcattatgttatccccggatatccttctaatgtgccctacatcgtaagcgatgaaggctacgggaagaatgattatatcgagacctcccgcccactggtagtggtaactgcccccggaccgggaagcggcaagatggccgtctgcctctcccagctttatcaggagcacaagcggggcatctgcgcaggatacgccaagtttgagaccttcccgatctggaatatcccattgaagcacccggtcaacctggcatatgaagctgccactgccgacttgaatgatattaatatgatagaccctttccatctggaagcctatggaaagactaccgtcaactataaccgggatgtagagatcttccctgtgctaagtgccatgttccagcgcatctacggcgagagcccttataagtctcctaccgacatgggcgtaaatatggccggaaactgcatctgcgacgatgagacctgcaaggatgcttcgagacaggagatcatccgaaggtactacgactcgctcagaaggctgctggaaggcgcctgctccgatgcggaagtctacaagatcgagatgctgatgaaccaggccggcatcaccgtccatgaccgcccggtagtggatgccgccctgcaaagggccaaggagaccggcgctccagccgcggcgctccaactccacgatggacgcatgatcacgggaaaaacctccaacctgctgggcgcttccgctgccttgcttctgaattcccttaaggtactggcggatattgaccatgaaagacacgtcatatctccggaggccatcgagccaatccagaagctcaagacgcagtatctgggaagcaagaatccaaggctgcacacggacgaagtgctgatcgccctgtccgtcagcgccgcaaccgaccctacagcccagctggccttagaccagcttcccaaactgaagggctgccaggcgcatacctcggtcatggtaggttctgttgacatgaagcagtttaaaaaattatccatccaggcgacctttgaagcaaaatatgaaaaaagttctgtatttttcaatgacaggggtgtataatctttaagtatttttttgacatgctatgtaaacagattcagctaaggaggaaattatggcagttaaatacgtatttgttacaggcggagttgtatctggacttggaaaaggaatcacggctgcatccctggggcgtcttctaaaggcccgcggatatacggtgaccatgcaaaagttcgatccttatatcaacatggatcccggtaccatgaaccctgtgcagcacggcgaagtgtttgtaaccgatgatggagcagagaccgatcttgacctcgggcattatgaacgattcatagacgaaagcctgggcaagaactctaacgtgaccaccggcaagatctattggtccgtccttcagaaggaacgccgaggagactttggcggcggtaccgtccaggtaatcccccacatcaccaatgagatcaaggatcgtttctaccggaaccctgctgcaaagaatacggagattgccatcattgaagtaggaggaacagtgggcgacattgaaagtcagccttttctggaatccatccgccagtttcagcatgaaaaaggtcatgagaatgtcatcctgatccacgtaacattgattccatatctgcgcgcatcccaggagatgaagacaaagcctacccaggccagcgtcaaggatcttcaaggcatgggtatccagccggatatcctggtatgccgttcggagtatcctctggatgccggaatcaaagataagatcgctttattctgcaatgttccatccagccatgtgcttcagaacctggacgttgaatatctgtatgaagcgcccctggccatggaagaagagaatctggcaggcgtcgtatgcgaatgtcttcatctggactgtcccaagccggatcttaaggagtggtcggagatggtagactacctcaggcatccgaatactgaagtgacggtagccctggtaggaaaatatatccagctccacgatgcctacatcagcgtcgtggaggccttgaagcatggcggcatctatagccgcgccaccgtcaatatcaaatgggtggattccgagaccgttaccgccgacaatgtggaagaacttctgggcggagtaagcggcattctggtaccgggaggctttgggcaccggggcgttcccggcaagatcgaggcgatcaagtatgcccgcacccaccatgtccccttcctgggactgtgcctgggcatgcagctggctatcgtagaatttgcccgcaacgtgctgggtcatcgtgacgcgcacagcgcggaattagatcccgatactacgcatcctgtcatccacatcatgccagaacagattggaatcgaagatctgggcggcaccctgaggctcggtgcttatccctgcgtgctggatactgattccagggcttataagatgtatggcaggcaagaaatctctgaacgccaccgccatcgctacgaggtcaacaatgattaccgggatgaactgtccgctaacggaatgaggatctcaggcctgtccccggatggcaggatcgtggagatgatcgagattccagagcatccttggttcctcgcgactcaggcgcatcccgaattaaagtctcgtcccaaccggcctcatccgctgtttcgcggcttcattgaggctgccctggaatacgcaaagcaaaaccaggcggtcacaggccagttcctgaatcgaatatagaaaaaccagaatatagaaagcctgcagggaagcggatgctaatcatgctgattaagcatccgcttccctgcaggctttcttgtttgatggattcattcagttcctccacattgcggtaaaaacgattgccagaaggcagcagcaaaaccagatgcttttgatcccaagcattcctgacatcaccgcgcccagcattgcgcccaggataaaaagcgcgataatcccaaagtaatgggcggcttcaagtcctgtcccttcctctttattgatcaggcatcgaaaaagtttctcagtccctgaacgcaagtttccggtacacatggtggtcgcataaggaaggtttttgatctttctgaaactgttgacttgaagggaacatacgaaagagatcgtaacatttaccacgccatcaggcatagacggcggaataaatcctatgatcaaaagcagcagcacctcgattgctatgatccagtgctcgtacatcgcgaattcccggctggagaagtattttttaaggacctctgtgataaacactcctatggaaaacgctatgatcggaaccacatagtacaacgcctgcctgtagtccccgtctgccatatggacgcccaaaaggacgatgtttccagtctgggcattggcaaatacgcctcccctcagaatataggtgtatgcgtccagaaaccctcctaccactgcaagcagggcagcgacccgaaaggtctcatgaatcggaattgctgtaatctcttgttctcgctccatcttatccgtatagattctcctttacacacttcaatgcttctgcaatcacctggtgcatatcatagtaccggtacattccaagcctcccgccgaaaatgacatgctcttccttttctgccagttccctgtatctttcatacagcgcattgtttttctcgtcattcattgggtaatatggctgggcgcccttctcccaggcggccggatattctctggtgatcacggtcttttggatggccggcgtccctgtgttcccatatcctccctggcatccatattcaaaatgcttatgctcgatgatcctggtataaggaatctcgtactccgtataatttactacggcattgccctggtaattttccatatccagtgtttccgtctcaaaccggaggctgcggtattccagttccccatagcaataatcgtagaaggcgtcaatcatgccagtgaatacaatatgatccgcctcgctttccaatatctccctatcttcaaagaagtccacgcccaggcgcacctccacgccttccagcatcttttctataatctgcgtatagccgccgatgggaattccctgatattgatcgttaaaatagttattgtcatacacatacctcaccggaaggcggcggataatgaaacttggcagttcgcttgcccgctttccccactgcttctccgtatatcccttaatcagtttctcatagatatcccgccccaccagggatatggcctgttcttccaggtttgcgggctccttgatgcctgcctctttgatctggcggtctatgatctcctttgcctcttccggggtcttgattccccacattttgctgaatgtgttcatgttaaaaggcagattatacagttcatccttgtatctggcaaccggacagttcgtataccggttgaattccgcaaattgctgtatataatcccatacttctttgtccgaagtatggaagatatgcgctccatacttatgaacttggatcccttccacttcttccgtgtaaatgttgcctcctacatgaggcctgcgatcaatcaccaggactttcttgccagccttattcgcttcataggcaaatattgcgccaaacagtcccgcccctactaccaaatagtcgtacttcatctttgcatctgcaccttccctgattatttctggtgattattataccccttctgcttttatatttcaacggataaccccatcagaccatttggcctggcttcccttctccgtctttgtcacctgaagcttgcagtcaatctgctccttcagttcattcacatgggaaatgatgcctaccagcctcttgtcgccggccagatcatgaagaacccggatggcctgttccctggctgtatcgtccagagacccgaagccctcgtccacgaacatggtatccaggcggatggcgccggctgtattctgcacgatgtccgcaagccccagggccattgccagggacgccataaaagactcaccgccagataaggtctttacatcccttacggacgcgctggccatatggtacacatccaggtcaagtccggcctggccctggctgcttaaattgcctacttcccggcattgcaggataaattcattggatgtcatacgcaccagcctctgattggccgcatggatgatctgccggaagtactgcctctggacataggtttcaaaatccatctttaccgtcccgctcagactgccgttggccgtcctgcttaagttttccagcatttcaaactggctccttaggattcctttcttatccagatactgcttcagatgctcctttacgccctggttcttccgattcatgctgtagaggcgcatggattcattctgtaccgcctgcgcatccgtctcggccttctggatctcttctagtatcttgtctgtatccgccggctccatcccttccagctgcgcttctatcgtcttaatcatgcccgcggtctcatttaccttgacgcggtattcctgaatcttctgttccaagagcgccgtttcttcttccggcattcttgcggcctggtatgcggcctcgtccgcaaagccttgcacctttagcgcctggttccatgcctcgcttcttattcctgcctctctgtcaagttcttccactgcttcctgactactttttttctggccttccagcctccgcacggtcaccatagattctttttcctcggcctttgcccgttcataggcctgcttcaaaagttgaagttcatcttctagctctgtcaggcgctctttggcctgctcttgggatagaaacggcaatccctggcactttgccgcaagatccgcctggatctgctgatactgctttttaagttctccttgttctgcctccagtttggagtgctgttctttcagcacggccagctgatcctctatctgccgttccagagtttttgcctcttcatgcagcttagcctctttgtctgccttctcatatgcccaagagaccttatgatacgcttcttggcattgcctttctgcctccagaatcctatgacagattgcctccgaaggcagcattccttcatccggctcatcctccgtcagttcccggtatccccttaaaaaggcgttctttccagaaccataccggatggccgcctcctggaaggcagcagcagaggcatcccttctcctctctgccagattcctgctttccctggcttcttccacctcctgctgggcaggcgctccttcctttaacggctggagggcgggatggcttgtggcgccgcatacaggacaaggatcccctgcttcaagcccctgggcaaggatgcccgcctgttcatccagaaaggcctggtactttgcctcatagagcgctgccgcgctcagataggatttccgatcctcttctgacctgcagcgcttcctgtgacattcttcctccagcgacaaaagcgtgtcaaaggaacctttcagttctttcaactgtaaaagccggtgggagcattgctcctttttcatccccagggcttccacattcatcttgctttcttcgtataattcctgtgcccttcgcgcttcctctctggagtgcttcaagccgtcctccttcgtttctgcttcttgaaggaccccctgctttttctccagtgtttttccaagcgcttcttgctgctctttcaaggcttctatctgttcgtaccggggcagggcatcttggattctgataatccccgcttcgcattctgccttccaatccagaaattcctgctccttcttactctttacggcttttaatgcttccgccaggatttgtgcttcctccagtttttcttccgttatacgcagggtcttccttcccctgtcaagattcatccttgcctgtgcaagcgcctcctccgcagaagatgccttttccgcccgtctcgcctgcgcaagtcttctttctgattcctggtatctctccttctcctttccaagttcctgccaggattctttcatattctcataggtttggaagagttcattgcgtgcctctgcttccagcttcttgctctttaactgatccagcctttttgccagcctgtcagatattttctgtttctccttttccagagcccgtccttcttgcaggatttcttccagcgtcgcttttacctcttcataaggcaggacggcaaggctttttatctcttcccaccgttcttttgaaggaagggcctcctccacttccacccgctctatttcctgcctgatctcgcgcagattatcttccagttgatagtagagcctgcccgcgtttttctttaattcctcctgcaccctgtaatagagcctggtctggaatattttcgtaaatattttcttgcgctctttagattcggcatgcagaagtttcaggaaatctccctgggcgatcatggcaatctgggtaaattgaaccgaatccaggccgatgatctcctcgatcttctgatccgtctcccgctttttgccttgaaagacgctcccatccggcaggatcagttcaaccttggaaggttccttcacatatctggaagagccgtccgcatagcgccgttttcccagccggatatattccggattcctgcggatcgtatattcctttccctgataggagaatgtgtattccacataagtacccatatcttccgaagcatactggctgcgcatcatattcccgtcccgcgctccgccgctggtctggtcatacaacgcataagtaatggcatcaaatatggtcgtcttcccggatcccgtatccccggttatcaggaacagcccttgctgcactccctgaaaatctatcgtcgtcacttctgcataggagccgaaggctgacatcactaatctgatcggcttcatcgctcttctccctccgcctcgtcaaacatcttcttcataatttccaattcttcctgtgcaagctgtctgccctgcatctcctgatagaaatcacagaatgtctccagggggtctttaagcaccagttcctcgtccatctcccgcagcttatttctggttctggtattgtctgcctttacctccaggatccggtcaaatacttcttccagctgttctttgggcttatagggatccacctcgtcagtcagcgtaatgctgacataatcatcccgctccttttcattcgctccctcaagaatctccgccagattccccctcttctttttgacatcccggagaggatgaagcgcaagccgctctgctttgggaggcgcgcccttctgggaaagggttaccagcgtaagcgccttttcctggccagactcgctgaccgaatatttcagcagcgtgccgcagtagcagatatgaggcatgcccacgcactgggcgccgtgcagatgccccagagccacatagtcaaacgcctttaccgccccaatatccacattatcgattcctcctacagaaaatgtctccgaatcgcaagtcttcggcagttcatttcccttatagaattgatgggagatcagcacgttgcgcctgccgcagtagtcaatctcttcccgcctgatcagttctgcgacagcatccccataagtctgaggcggttcttccggaaatacgtttcttacataggaaggcttcaaaaacggcagcagataaaaatccacctcgccatattcatcgtttagcgtcaccttgcgtatgtgctctccctctgtccttggagccgtccccgcaagatagatctggtggtttttcagaatgtcggaagcataatcaagcctctgggccgaatcatggtttccactgatgatgagtaacggaatagccggggtaatctcagaaagagaggtcagaaattcgtcgaagacggcgaccgcttccgctgaaggcacagatttgtcatagatgtctcctgcaatgatgatggcatccggacggaggtctttcgcatacgccaccacttcctccagtatggcctcctgatcctctcttaaattataacggtgcagctgcttgccgatatgcaagtctgaaagatgaaaaaatctcatggtcaccagtccttcctatatttcgcatcggagacgattgccgatatgatcagcacgaatgcctattctataatccgccttggcctacatcaggaaccggaaccaattgaacatgccgacaaggcggattcgctgttcccgctttttagtcagttcctgcctctcgactccttccgggatctcataatgctcttcgtccaggacttttacagaatctgcctcatatgcttccatatagcccttcagctgactagttacttccttactgtcaaccaccagcatcagttccgtatccagatatgcgcttctcatgtccatattaaacgagcctacaatcgccagttcatctcctatggtaatactctttccatggtaagacaccccgccttcatactcctggattttaaggcctgtctccagaagccttcctttatttttctgataatctgacgctccaaaaggattcccattattggcaaccgaattggtcatcatggttacattgggattttcctcgcagatttccgcaaatgactggtacatccagtcattgcagatgacatagggcgtatggatcgccacttcctcatccgtctcttccatcagccgcttcagggaatagaacagcgtcggttccttggagtatacatgggtggggttgtaaagaagcgtaatgcggttcacttcaaaagtacgctctacatagtcacgcgctttccccatgtccggaaactccttgttcatcttctggtaccgcttctttaattcctccctggcctgggccactttctctttggatgcattcttcgaatcgttataaaaaggcttgcagacatcaagattccatacagactcaaagtactcttccaactggtggatggaactttcctgattttcaggttctggcgtatagaccagcacatccctgtcataattcttatatccatgatctcccaggaaataatcataggtgttcctgcctcccagcagatagagatcgtcgtctatgatcacatatttgtcatgaagccgtcccatgctcttccagggcatcagcagattaatccggttatagatcctgatctccaccttgtccatggtggacagcgcctgaaaatatgcattgccatccatctgctgcagcgccgagaatccgtccaccagaatctttacatccacgccccggtctgccgcctcgatcaatgcggcgatcacgtcctttccgctcttatctgcatgaaagtcaaaggtggacagaataatccggtccttcgcctgtgcaaacatattcaatcgttctttcaacgcctcttcattatcttcgatcacgcaggccctgtcgcaggaagcctgatccgaatagtattccttggggtcgaagccctcctgatattcttcgctcacctggggatgcctgatataggacagtatgattcccaatagcacatatagaatgaatgccacaatgataaataccaaatacctcaatttaaacctcagtctcttcttcaatgtgattcctcttctcctgcttcttttcgcatgcgcccgtaaaacagcacataacttgccaatgtaaacagcataatcaggcagcagaggcctatcatggccttagtcgccatagccggcagccctggtatcagaagaagaaggaatatcattacataggtgtatgcggtgcatacctttccataccactgggcaccgtccatatgccgtccttttttcatcatcaggcctcccataatgagcatatagccttctttgacgatatacagcagtactaccgcacgcatcaatggatagcgaaaagtcaggcttaagatgactgccccaagggtcagtttgtccgctatggggtccaggatctttccccattctgtaatcagatcgaaccgccttgcaatctttccgtcaaagcagtccgtaagccctgagattccgatcaccgcggcagccttcacataatccgccgtcccgcttgcgttaaaataaagccataagtatacaggtatcagtatgatcctgaagtatcccatcagattcgggactgaaaaatattcccgcttccagtcttgtctcaccgtacattcatcccttccagcatttgtcttgcttcctgcacatagtagaggcgtccgcccttttctgtctcatccatatgtaagcctcctgtttttaagtaattgtattgcttgaatttatttttttcctttactatacttctattttcatatttttgcaagctatacgtctgcaagagacctgctaacctggatcttcgctatgactgcatagttcggatcccccagcacactgccatcagttgctgttctgcctcttttggaatattcaagcattaaccagccagcccgagtgcggttcttcgcctcggactggctttgctttccttacaattgatactttcaggatccttttctaccgcatatcgctctttagtcttgtccacgaccggctcggcctgtctttcagaaattctctcagatactcgaactgcggatgcttcttcagaaattcctccgcataaaaaggcatcccgcagggactcccccatctggcccataaactcagttccttcgcgtcctcgctgtcggcggtcaccgcatccaccgctccccttggctggaagggaaccggcctccccggctggctcatgtacgccctgtcatccagttcataatgggcgcataccgttcgggagcatggattctccctattcaggtatacatcgaaatgatccgccagaatctcctgcgcagccagattatctatcctccccttatattcttccaggagccagggaaggcgaacctgtcttgctccctggtgccgccggatatccgcgaaaccgctgttctcgcattccaagttgcggattctaggatccaaaggtgcattaaagcctgcataatatccatcagaggtcctgtctatatgataaaacttaagacctgcctcaaaccgcatgatctctccagtctcaatgtcccctgccagccaggtattggcatacccgccgttattgtcttcccagaaaagttctacgaattcatccaggcattccgcatactggacggctcgccgaatcctcgcgaactctggcgcgccgtcgcagtcataagcattgaatcctccaatggtggtctctgttatcatcagtcctcttccctctccaacccggatctcatagaaatcggaaaggctatggatataacccgggcaggactgcatgagaaagcgattcccttctgccggagccagatctactactacattcatataattgctattctcatacggcgtaaatctattgtgtgccataacaatccttccatcagtcgtgtatgtccccgttgctataaatgcgctgcagtgatccccagctccagaaggaaatcttttcaaggttcttccgcctgcatgccggataccatgctgtacgtccaggctatcatagagttctggcgctgcgttggggatccaggaaccggtaagttcctcatacccattccacagaatcagatcatccagcgtcactggacagtccggtatgacttgcctgactccctgtaccatgccctgcatttcttccagaaattctttgtaaggcttcctgcataagtgctccttccatttatgcaaaatactgatctcgctttctttcaaaaactcccattctatgcccgtctggagcattaccagccgggacgcctcgcttatggcatttgtgatttcttttgccatgagcctcccataggagacaccccggtcaaaaggcgctccctcgatatggataaattcccatccatcccttgcgaatctatttctttccataataaatacttccctcataattctacttctcttgttataatttccaggtcatctcgctccaattcgcttgaaatctaattatccaacccaggaaagtttcggggataaatgtgaatgtttggagccgttacatatccgtacagaaatgaagcgcaggatccaaaaactggctgccctatacggaaattaggacaagaaggttattttcataggcataaacttatcttaaaatagttcttgcaaaacatttttaatcaagttatcctttatttcaaggacgtccttaatcactttaaggagaaaaaatatgaagcaggataagatgcaggaacttgaaaaaatcattcttcgtgactatggaaacatcgcgggaatgatggtattaaagaacggcaaaacgctgtatgatggctattttaacggatgtactgccgccagccgctgccacgtctattccgtaaccaagagcattatttccatattgattggaattgccatggataaaggatacatcaaaaacgtggagcagaaagtattggattttttcccggattacccagtcaaaaaaagggagacgacgatacagaatattacgcttgacctgctgggaggccggggacagattttataaaagcaaccggacagtctgtattcgatttcgcagcagaaaacttgtttcggcctctgggaatcacggttgagagaaatctccttttccataatgcaaaggaacagcaggcatttaacaaagcgaccgatatcagcggttgggtcatcgattccgcaggagtcaatgcggcaggctggggacttaccctctctccggcggatatggccagaatcgggcaattatatctgaatggcggaacgtggaatggaaaacggatcgtgccggaacactgggtgcgcgagagtacaaaagaacatagccggtggaaaatcgcaatctgccttatggatatttgtggtgggttcatgcggacggctatgcggcaatgggggatggcgggaatgtcatctatgtcaataccaagaaaaacatggtggtctccatttcttctctttttaagcgcaaggccagggataggatagagttgattcagagttacatagaaccaatgtttgaggtataatgataactaaatatatatttccatagaataggagaacagccgtatgaatattaaagaaaaaatgcacagcggagaattatactaccccggagatgagacgctgatgaaggaacaactggcataccttgaaaaattatatgattttaatatgacgcgccccacggagcaggaaaaaagaaaagaaatgttgaaagaaatgttcgcggaaattggggaggactgctatatcgagccgcctctgcatacaaacttcggtggcaggcatgtgcatttcggtcatagcatctatgccaatttcaacctgacgctggtagatgatacccacatttatgtgggggactataccatgttcggccctaatgtgacggtagctactgcaggtcatcctatctgtcctgagttcaggcaggaaggatatcaatataatttccccgtacgcattgggagaaactgctggattggcgccggcgccattatcgtgcccggcatcaccatcggcgacaacgtcgtgatcggcgctggcagcgtggttacaaaggatattccttctaatgttgttgcagtgggcaacccctgccggatcctgcgggaaatcggcgagtatgaccgggagtactacttcaagaaccggaagttcccgcctgtagatcggccttaatattgaagcggcgagaaatttaaggggggacagtttgatataaaaatagtgtcttcgacacttcaactcccctgcccctcaatcatgagggataggggtttctttttgcttcattttgcttcataatggtcttatgaatatcttacaaaaaatttttatcgaacattatgaagaaatgatttatcttcaacatcctcgtgatgctattgttgagaatgtagaaaaaatgattcattgtggcgatccatcttatggtggcgccatgtatatttgtcccaattgtggtaatttcaaatttactgcttttcgttgtcattctcgcttctgtccaacttgtggtaacatgtattccattgacagaactactgctatgtcttttaagattattgatgtacaacatcggcattgtgtttttaccattgatgattctttgcggcctttttttcttaaagaccgttctcttcttaactgccttttttcggcagtcaacagcgtgatttctcgtatgttccataaagaaaataaatctgtattatttactcctggatttatttgcgtccttcatacctttggcagagatttaaaatggaatcctcacattcactgccttgtttctgaaggtggtgttggtaatactctttcctggcgacacttcaaacattttaactatcattttttacgtgatgcgttccaaactgctcttttaaatgaactccatcaaaaaataggtccagctttcaaaaaagtaaaatctgctatctatgcaaaagataaaaatggtttttatgttcgcgccatgcctaacaagtgtaatccttctcaggttatcaaatatatcggtcgttatcttggcagacctgttattgctacttctcgcattgattcttacgatggtgattttgtcaccttccattacaaccgtcatgaagacaataaacttattacagaaactgttcctgttttggaattcattgaccgcttaacacaacacatccctgaaaaacattttaaaatgattcgctattatggtatttacgctcgtcaccgtaattctgacaattttttacgaaaagccatttccagagaaaaacataacttttttctttcactcaataggtggcgtgattcaatcttacattcttttggttacgatcctttaaaatgtccgaactgtggaaaaaccatgctatttttagaactatattttaatcataatcctgttcctttgcatgaattatacgaaaaggctatgcaaaaacatagatgtcgttcgcctgcctcgttttcatatcttccaaaacctcttttctcatgataaactcaatatatcttaagaacggaggccacactatgaaacgtataacagaagcagagctcgcaaaggaactaagggaacagtacattaaaaatccaccagaaggtatgacttctaaagaagtccatgacatgagtgacgacgaacttctggatatggattatttcttacatgaatttgataaccttgatgatgacgattttggtgaagagggcttttacatcttttaatccaaaccgtctgattcactatgcccgcttttgagcgggctattttagtccccaagttctccgaaaggagaactttcctataaaggaacaagaggacttgcaaggtttccgacctttcaagtccgcttcgccttgttccttgacctcactacatactaatcaaatacgctttattgcctaatttcattcttccatttcttgtaattataaaaagcctgcataagaattacactaaaaatcacaatttcaattatccctgtgaagatatttatatcaaattctttataaaacccaacaattataataatacctataagaatcaaccacaatgttctaataaatttccgtctataacttaatttccaataacaaatttctattcctctgtctactttttcactcatttcatatcttttcgaaataaaaaaccaataatttccacaattaccaaataattttaacattttctatgccttttaccagttaaatgtatgtaaaagactttgaataaacaacacttctttctgttatagtattttgcttcataaattatttacaccataataccgatatattgctgaaccaatgtattttgtaactccttttccgtactgtttatctgtaggttcttccatctgagaatgattcagataatctttggcgacttccaataacaaagctcttggattctccactctaaacatatttttgtaactttctcccagtgcttttactgactctattgccagttcttcatcaaattgagccattgcaatggcaaactgcttataaaccgaatcgattgcaattctttgttcttccatttcctctcggctttgccctgttgacttcagacttgcttctactgctttttctttgcttccataaatcttaatcaaatgttcacacgccttttcatctttgaagctttctgaaacagattctttaaacttatcaacatttccataacgctcaataattacttttttatcctcttcactcataatttctaaagaatgttggattattttttgaatgtcatcatcattgaatgcttcaaaactcatcttgtcctctcctttcaacacatcagaaatcaattcgataataccgctcagacgattccgtttcatttccaacatcatcttctgtgtttcaagaatcttacgattatcactttcagaatctttcataattgcttttatttccgacaatggaacttctagttcccgaaaaaacataatctgacgtagttttttcaatgacctttcatcatacaagcggtatcctgcttctgttactttagcaggttttaacaaatcaatttcatcatagtatcgtaatgttcttatactgattccagtcaattctgatacttctttaactgttttcatatgtcctcctttccctttcatcgtaaaccgttacgttactggagagtcaagatattttttccattttatcacatcttcaataataccgcctttacttttacaaatgagaaatgacgcagataatgttttcactacctacgtcatttcccattacatttttgaaatatttactccattttctttcaacttttactccaaatttactccattttaaaaatctgttacgatattttacgatattctacgataccttttctttgaagaaaaatgtctgtaagccttgatattcagcgaacttttcaatatttccaagcactttattctgttgtgagcttttctctcaaattatttcatcacgatattaatgattttcttcggcacatagatttcttttacaatcgtgcctgtcaatttatctgccactgcttcttttccttcggcaatcgcatcttccttggaaatgtccgctgccacggaaatgactgctcttgtcttgccattaatctgtactggcacttcgatctcgtcatctttcatggcttccatgtcataagtcggccatccggctgcgaacacgctaccctcatgtcccagctgctcccagatttcctctgcgatatgaggggcgaatggggaaagcagcactgccattgtggacaatgtctccttatcgatcgcgccttccttcttggcaatctcaatcaatttattgttatgctccataaatcctgagatcgctgtattcaggctgaaactttccagacgggttgtaatgtcatacaccagtctgtggcgctctttgatcatatccttggtagccttaacatccgcatccttgctgtccatcacaagattccagagacgcttcaagaaacggtttactccgtcgattcctctgtcatcccactctgcatccagttccggaggacctacgaacagttcatacatccggagggaatcgcatccgtagtctcttaccagatcatccggggaaaccacgtttcctttggacttgctcatcttgatgccattcttgccggtgatcattccctgattgaacagtttatggaacggctcgtcaaagtcgatcgctccgatgtcatataaaaacttggtatagaagcgggagtacagaaggtgaagtaccgcgtgctctacgccgccgatatacatatctaccggaagcatctcgtctgccttttctctggaaaccagttccttgtcattgtgattatccacatagcgcaggaaataccaggaagaccctgcccactgaggcatggtgttggtctctcgcttggcaggctttccacataccgggcacttacagttcacccactcgtcaattccagccagtggagattctccggttccggtaggctcataggattctacctcaggcaggcgaagcggaagttcttcttccggtaccggaacggctccgcagtccgggcaatgcacgatcggaatcggctcgccccagtatctctggcgggagaatacccagtcacgcagcttgtagttcacggttgcccggccaagtccgcgcttctcgatgatgtgtggcgcctctttcttaagtaccgcggattccatgccattccattctcctgaattgatcatggttcctgccgcttctgtataggcttctgtcatattttcgatttccttgccgtccttggcgataacctggacgatcggaattccaaacttggtggcaaattcaaagtcacggtcgtcatgggcaggaacgcacatgatggctcctgtaccataatccgccagaacgtagtcggacagccagattggcgtcttctccccgttcagcgggttgatcgcgtaacttccggtaaatacgccggtcttttccttatcctgcatacggtctacgttagacttcatggacgcatcgtagatatacttttctaccgcctctcttgtctcatccgtagccaggctcttggaaagttcatgctcaggcgcaagtaccatgaaggtagcgccatagagggtgtccggcctggtggtgtagaccgtgattttttcttctcttccttcaattgggaaatctacttcagctccataggactttccaatccagtctgcctgcatcttcttaaccttctccggccagtccagcttgtctaagtcgctgagcagacgctccgcatacttggtgatccgcagcatccactggcgcagattcttcttggtcacttccgtgccgcagcgctcgcacttgccattgacaacttcctcgttcgcaaggccggtcttgcaggatgggcaccagttgatcggaaattccttctcataagcaaggccttccttgaacatttttacgaagatccactgggtccatttatagaattcgggatctgtagtgttcacttccatatcccagtcatacagggcagcgatctcgttaatctggcgcttgatgttctttacattctctgctgtggagattgcaggatgcacgcccatcttgatggcatagttctcagctggaagtccgaacgcatcccatcccatcggatgcacgatatagtatccctgctgccgcttatatctgctccatacgtcagagattacatatcctctccaatgtcctacatgaaggccatttcccgacggatatgggaacatgtccagacagtagtacttttcccgcttattccccttttcgtcagccttaaggttgactggattctgctcccatctttcacgccattttttctcgattgccttatgattataaggtacgtttgacattattctttcctcctgctcttttgatatattaaggcccatcggccttgtcagcataactgctttcttagaaaaagccttctcatctcgcaagagacgaaaaggcctgaacttccgtggtaccactctttttcacccgtactgataaaatacagatgcactcattatcttctgtaacgggaaggcccgcttctgcctatgcgatcatacagggttcagcagaagaactccaaggcgagttgggagattacgcttgctgccttgcaccatccggcagttctctgtaaaacggtaggctcttactactcctcttcttcgtttctacaatattcttacttattatatgaagaatgttaaaataagtcaagtcctgattttagggttcctgaaaaacttattttttgtagttgttcacgccttggctttagtgtataataaacataagtaaatggtactgaaaacttcagtataatatgatacataaaggagaggtttgccatggtaaatttattaacaggcccaaaaggcaccggaaagacacaacaaatgattgagcaggctaatcagcaggcgaaaagctgtaacggaaacgtagtttttatcaaaaagacacatcgcgacaccgcaagtgttgcatttgatatccgtacgatctgtatggatgattttccagcaattgaaaatattgacgagtatatcggctttttatatggcatgtacagttccaaccatgatattgaatgtgtattcatcgatggaatactgaagcatgccgatatttctttaagcaacatgccagaattcattgagcgccttaagaagatttcaaaagaatgcgacattgaattctatgtaagcatcagcgccaacaaagaagatttatctggtattgaccagacaggctgccagtatctaaactagaacaaccggaaaatacacgaagcgaatggaattgcagggcggtccagtgatggactgcccttttacggtatgagaaaacgagtggaatcaaagaccaaaaaagaaacaggcttcggctgatgctgtgcgctcttttttctgtatgagaagtataaagacaaatatatcgcctacagtcttggaaagttctgctttggaggcaattccaacccggaagataaggatacgatgatcttccagcagacatctacgtttaaaaagggagtggttcaaaagaacgatgacatccatatgattccctgttccctgtcctctgccagcggatataatgactattgtccgactccgctggaaggcgactccaaacagagagtccttgataagatcgaagaatacaacaaagacttatagatggcggtataaaaactcatagaacataatcatcagaggcatggtcgcaatacagaagattacggacatgacgttgatcacgctggcataacgggcatctttgtcatagatctgcgccatctgcgtaatcatagtggctacaggcgccgatgtgcacagcaggactaccatcaatatatattcggcatctttatgaagccatatttggcctatgaacacgaatgcaatagtagccagcgccggaattgcgatcaaacgaataaaactgataagatagggtctcttctgcctgaatacccagcgaagatccacgttgccgatcaccatgccgataaccagcatgctggccgggctgatcatatttccgaaactgctgacgcagctgccaattaccaccgggaattttatctgcgtggcaaacaggaatcctcctatcagcattgcgattatattcggattcagtatgatcttcttataatctctttgtgcctcctggcttaccagaccccggccgtgggtccacagaaggacggtctgcaccacgatgaatgctgtggtgtagaacacccactcctgtcccaggacggatgctaccaggggaatcaccagaaatcccgaattggaatatatgatcgaggccttttcaatgctgttgaagtgcagcggcctctccaggacttttgttaaaataatcatggcggcatgaacaccagccgccacaacgatcgctatcaacagtccctgtaccttatccttggtcaattcgatctgaaatgaatttacaataatacaaggcgagcagatgtagacgaccatattcgacaggaccttgctgtcttccgtccgaaacaggccaatcttgacgacggcgtaacctaccgccatcgtcaggaacatcgccataatctgttctgctaataacatacttatttccattactctttttcttccttgtctactattccgtcaaattccagagacataacaaggtttgcctttttatcctctttgtactctatcgttacttcctgccctggctcgcatctaactacatcgataaaatctactacggatgcatcaaagatgtcttctgaattctccagcatgaggtaataatgagaggttccctctatgactccctgggcaatcttggtaatctttccggtaatcgtcttgacttccctggtgtccttttccacttctttcacgccattgctgaacaacagttccagataattttcctcgcattggcttacgctgtcgccgattgcgacaatctggtatttctgtacattcaccatcgcgtatttctttacgaggcccgaatcatccttgagtgcgataaaatatgtcggctcatccgatatattgagcagcagcgggaaggtggccgtgtacttcaggttctgcacctggccttctgcagaggacatggcggaagcctccgttgctccttctaccttatagtacttcgtctccatggtcctttgattggctaagacaaatcctacatttgactggtcgccattaacggaagttacgcccgtgtacatccatacgtcatcatcctgggcaagatagttgtatccgtccgtggtcttaagacagtccttctggctcaaaatactgttgaaaaagccatgcttcaaggttccataataatcaaacaactgtaccagcaggtctgcggaatacgcccggtccacccactggggaacgtctttgatgtcataagtcttcgtctctccggtaatggcattgcaaagcactactttgcccaccgtctctcctccgaaaaggccgatattgtattttttcacaggagcgatccagtatggaacgcccttttcatcaatctcaaaactcagttctccataaatatacgtaggatgcgcaaaacggagatgacggtagatattccggttcagatgctcgctggtggtatattttatgccttcatccagttttactagttctgtagactgggtggccatgttaatcctgatataagcggggattccattggaacggttggtaaaccatttgatcaggtttgcgtactttaatggagatacccgaaccggattgccctgatagttaatctggctgtagatgtcgtccgcctcaaactgggacaccatatccaccatgctgcccatcttgcggtcaccaagaatttccgcggtatctttatcaagaagcggaatcttatcaaaagaaagttcttctatatcttccgtaaattctccttcttctactttcatcagcttctggtatttcttggcattgacgattggggaagacaataaggatccagccagatagatgattcctaatcccaggattgcaaagccaaaaaacttcattgtcttgcttgtacgcagttcggcctttccaattttcttgcggaccgcgtaaatgactgccaccatcaccagcaaaaatataataaaaaaccaggtgtcggaagagtggatgttgaatgcgggcaaagcaatatagtagtatagtcctgctgccaatatgaccacgattgcaattagtaactttctttttcctttcataatacctcctaaaatttcctgttccatgcggaagccgtaaacaacatcaggaatgggaagatctccagacgtcctgccaacatgtcaaagcagaacacgatcttagacagcggtgaaaactctgcaaaacttcccaccgggccgacatccgcgattccagggccaatattgtttaatgttgccaatacagaactgaatgtggtgccaaagtccagattgtcaatcgagacgataagcaccgatccaacgacaatgccagcatatgccatcagatagacatacaggcttctgaggacatccgctcccatcttcttgtcatttaccctgataatgctgatagactttggatgcaccatctgcttaatctcacgcttgatgcatttcaataccatcaggaatctggataccttgatgccgcctcccgtagaagacgcacaggcgcctatcaccattagcatcagcaagatgcactgggacagcatcggccaggcgttatagtctgccgtcgcatatcccgtcgtggtgatgatggatgccacctggaataaggcgtagcggaacgccttcagcgggtttggatactggccgctgatattcagggtgatcaccgccaccgctgcaaggatgattcctaagtatgcccggagttcttcattcttccataccggcttaaaatccctgatcagcaggaagaaatacaggttaaagttgactccgaacaaaatcataaagatagagatcacgccatctatataagcgctgtcaaaatggcctacgctggccgcataattggagaagccccctgttccggctgttccaaatgcatggatcaggctgtcgaacatattcattccgccaagcagaagcaggatgacttcaatcagcgtcaggcccaggtacatgccatatagtattctggcagtagacatggtccttggcaccagcttatccttttccggtcccggaacctccgcccgcatcagatacatggaattctttttatccagggttgtcagcaccatgacaaacacaagcacgcccataccgccgatccaatgggtaaaacttctccagaacagcataccctgcggcagggcttctacatccgtaagaatggaggaccctgtcgttgtgaagccggataccgtttcaaagaatgcatccagataactcggaatgctacctgaaatagtaaatggcagggctccaaataatgaccataagatccaggcgctggcgacgatcaccatcccctcttttccatatatggttctcttctcaggcttcttcattcctaccagcagatagatcactatcagtatgccggaaggtattagaaagtataccccgctgaattctccataaatcaaagaaacaagagcagggagcagcagcaggattgcctctacccccagcattttggccagtatgtatcgtatcattttcgtattcataatctacattccgtctccctatgcgagtatatcgctgaattcattgatgatatgatctttggtaatcacgattacgctgtctccgacttccagatgatcctcgccatttggaataataacctttcgtttccgtccgatacaggcaatcagataattcgccttggtaggcagatccttaagcggaacattggtaaatttgcattcctttttaataataaactctactgcttccacctttccgcccaacagccggtacatggtttccacatttgcgctgctgtaggaattattcctggctcttacataactcatgatcgcatctgccgttgcactctttgccgacacgatgctgtcgatcccaagtccctccaccatctgagctctggaatcttcgtttaccttggcaacgatcttatttaccccttgcgtctttgcaaagagagacatgatgatattctcttcatccattccagtcaatgcgatcaccgcatcggcctctccgatcccttcttccatcaaaaggtcatggtccgcagcgtctccgtggatgatcgtggcctttggaagtacctcgcaaagctgctcgcagcgttcctgcctggattcgatgatcttcacctgcatgccaacctgaagcagctgggccgcaagatagaagcacacatgaccgcctccgcaaatcagcaccttcttcactctggcattcctgcgtcccaaagaccggaagaatgtctccaaatcctgatgggccgcggcaatatgcatcttgtcacctttctggaggacaaagtctccatccggaatatacacttgtccgcctctttttacagcgcataccaggatcttaatctggaatttctggtatacttcggccagggacaggcctgtaagaggactttcgtctctaaggttgaattctaccagttccactcttcccttcataaatgtctctaccttgcttgtctctgggaaaagcagcactcttaaaatctcattggcagccgccagttccgggttaaccgccatactcaggtgcaaatcctcttttaatatatctatctgacgataatagacggggttgcgcaccctggctatggtatgctttgctccaagcctctttgccagaaggcagctgagcatattcagctcatcggtagaagcgcatgcgatcacaagatccgcatgcgggacatctgcctgcttttggacgtttacatccgcgccattgccggtaatgcagaaaatatccagctggtttaatgcctcctttaactttccttcattctggtcaatcaatacaatgtcataatcttcttccgacaattgcgtcgtcagtttatggccgactttgccgtcgccaataatcactattttcatttcctgttcctcatactatcctcatctgttttttgcatagcaaagagattatagcacttttgctttaagaaaaaaagcccttccgggcttttcttctaaataagttactgtcaagtaatcgttggcaactttctttccgatttatcttttctgttcaaataagttctttttctggcttctaataccccccatgtgcagcaatcgttttcgctctccttgtatctttccatccagtcctaccacatgcccgactgctggatattcatagccctttccgtctttcttcggtgccttcgctgacatcaggatctctccatatagctcttccactttttcttcttcaaataccggtctacgcacacgttctgtcacttcacacagtttcccactgcatttttttgccaagatcttcgccagatggttcccgccccgtcggctccaactcctgtgcccatgtttcatccgtttcgcaatcacactccacacatggttctccattgtccccatgttccggtattccaccccttccggcggttccggcaactcaagcccctgagactgatatgacaaaagtccttcccggttattctcataataccggatcagttcttctgcatcgtcaatctcactatcatcacttagactgttccggtagatctccagataccggaataattcttcaatctcttcttctcttagaagttctaaaacggcatcccgagcagtttcttcatggatcttttcttttacggctttattccggtggaatggatccaactggaaacacgtgcttttatcttttactttcttaatccatgacgccccatctgcatttaagatcctctggcttacttcatccagattaaactcctgtgcaatcacggcctcccggtattcctgaaattcttttgcttttgaaaacccggcaaccaccactttattttccagggtataacggtccggaccggtccttctccatccatcataagcaatcccgatcttcatctctgccttatcctgcttttccttctttctatctttgccctgcagcctgatataaacaccatctgcttcttcaaacagaacaggaacctctcttttcccttttacatgccctctcttatattcttctgtcagctctgcttcttcctcgcagactttttcccctagtgtctggataacattccatactcccattgcgctgatggtctggcctgtcatctcactgacctctaacgcgcactctctgtaagacagttccgtaatccctttcaccagcagttccgccatgttcgttgatatcaggcctacatgatccagttccaatgtttcatccagcagatatacaaaacacctggttccgtcttcctcattcacttcatagacaattctctgataggtcacttcgccatacacggtttttatggctgtctgcctggctcccttattccgatacttcttcttatccctgttttccatcagcatccgatcataccgctctaagaattcttttgtaaactctcttccgatctggcagacccatgcaaaaatatttttctccaactccttgaatgttacgccgttttcctttatcattgaattcatcatacagactccttatgttttttttcgtcaattaaacaataagataaatctgtatgattgggaagaggtttcggtctcttccctttatttttgccaatgataattatactctaagtctaaataatatgttccttattcttctgctgctctttttgcgatttccgcttcctggacatcagaaggagcctgctcataacgggcgaattcataagaatatgttcctcttcctcctgtcatggagcgaaggatggtgcaatagccgaacaatcctgtcattggaatgtctgcgacaatctcctggtatccgcctgcaatcggattcattccaagcacgcgtccgcggcgcttgttcagatcgcccatgacgtctccggtatagtcttccggcactacgactttgatggatgcgattggctccagaagtacaggccctgcttccataaatcccttcttaaatgcctggattgtagccgtcttaaatgccatttctgaagagtcaaccggatggtaagatccgtcataaaggattgccttgactccgactaccggatatcctgcaagaggtcccttctggacagagtcctgaaggcctttctcaactgccgggaagtagttcttcggaacggctccgcctacaacgacttcttcaaatacataagggctctccagatctccggatggctcgaatttcatctttacatgaccgtactgtccatgtccaccggactgtttcttatacttggtatccacatcggatttcttcttgatcgtctcacggaaggctactcttggagtgtccagcgtgatctcgcatttgaatctggcagccagcttgctcgctacaatctccagatgctggtctcccatgccatagagcagggtctggcggttctcgctgtcatttaccgcccttaacgtaacgtcttctgccatcatcttctgaagcgcctgggataccttgtcctcatcccctttgttctttacaatgtacttcatatatgtatatggctttgaatactccgtccttccatataagactggcgtgccttttgcggagagcgtatcgcccgtcttagtattggagagttttgctatggctccgatgtctcctgcaaataattcgcttacttctaccggcttatttccaatcatcgtatagatcttgccaagcttctcttccgtatcagtatccggattgtaaagcgtatcctcgccttttaaaacgcctgaacacactttaatgaaggaatactttccaataaatgggtcaaccatcgtcttgaatacgtatgcggattttgcctttgcaaagtcataattcgcctcgaagatctcgtttgtcttccggttgatgcctgcacactctctgtattccggacttgggaagaatcgaacgatatcagacaggagattggcaactccctgcgcctggatattggatcccattgccaccggaacgatgcttccatccatgacttccgtacgcattgcagagcggatctcttctacggagaattcttctccagcaaaatatctttccataaagtcatcgctggtctctgccactgcctccagcagcttctcgcggtaaatctccagatttggcttgcagtaatccggaatttcgcattcctctctctgcccgatgcccgtgtagcgtctgccggcattcttgataacattgacgtatccaaccagtttttcattctcgcggatcggctggaagtgaggcgcgatcaccttgccatatctgtctgtaagatcctgcactacctgacggaagcttgcgtcgtccacatccatctctgttacgtatatcatgcgcggcaggttatatttgtcgcataactcccacgctttttccgttcctacttccacgcctgccttgccggatacaacgatcaccgccgcgtccgccgcgctgactgcctcttctacctctcctacaaagtcaaaatatcccggcgtatccagcacgttaatctttgccttctcccattcgatcgggactaaggccgtgctgatagagaattctcgtttctgttcctctttatcgaaatcactaatcgtattgccatctgtgattttgcccatacgattggtcgctcctgatacataagccatagcctctacaagacttgtcttcccgcatcccccatgtcctaaaaggacaacgtttctaatctcatccgttctgtaaaccttcatatctgctgcctccttatattggtaaaatctcatgtatatattgtactaaaaaaaactctttattacaactcttttatacattatttacaatacattgtttgatttaccgcgcaaccccaaatactttttcgctttaaagcgttatagcattgacaaacccggctcagacagagtaaaataagttggacacagcaaaggaggactaacatgaaacttaaaatcggctttatcggcctgggcctgatcggcggctcaatagcaaaggcaatccgccagtattatcccgattacgagatcgtagcctttgacaagaataaagaaactctggctttagcgactcaggaatccatcatagacgtagccgcaacaaccattgacgataacttccaccattgcagttacatattcctgtgcgcgcctgtttcctataatacggcttacctaaagcagatcaaaggatatctgcacgatggctgcattcttaccgatgtaggaagcgttaagacaaatatccaccgggaggtggaagcacttggaatcgagccatatttcatcggcggccatcccatggctggttccgagaaaagcggctatagcaacgcaaaggccatgctgattgaaaatgcctactatgtgcttactcctaccagcaaagtaccccgggaaaagatagataactatgtaaattttgtccgtgatctgcgggctatccctattatattagactatcaggaacatgaccaggttaccggaaccatcagccacctcccccatatcatcgcgtccagtctggtgaattttgtcagagacacggatacaaaggacgaactgatgaagaacctggctgccggaggatttaaggatatcacacggatcgcttcatcttcgcctaccatgtggcagcatatctgcctcaagaataaggagaatatctccaggatactggatgcatatatacaggctcttggcaaagcaaaggaattgatcgatcaggaggatgagcagggactctattccctgttcgacagttccaggaattaccgcaattctatccccggctcttcagccggaccgatcaagaaggccttcgccgtatactgcgacattatagacgaggccggcggaattgccgccatcgcgacaatacttgcgtccaacaatctgaatatcaagaatatcgggattgtacataacagagaatttgaagaaggggttctgcgtattgaattctatgatgaaggctcttcaaaacgggccgcagaattactgcagaaattcaggtatatcgtttatgagcgttagaactatagccaaggcaaagaaattaaaaggagaaatcacggttcccggcgataagtctatctcccaccgcagcatcatgctgggggcaattgcccagggaaccacggagatcaccaatttcctaaccggggcagactgtcttgctaccatcaaatgctttcgcaaaatgggcatcgacattgattgccgcccctccagcatcctggtacacgggaaaggcctgtatggcctgactgcgcctgatgggatactggatgttggaaacagcggcaccacaacgcggctgatgtccggcatcctggccgggcaggacttctcctgcgtcctgaatggggatgattccttaaaccagcgcccaatggcgcgcatcatgaagcccttgaacagtatgggggcccatattaccagtatcaaagacaacggctgcgctccgcttaagattgagccgggccatcttcacagcattgtctatcagtctccggtagcctctgctcaggtcaagtctgccatccttctcgcggggctctacggagatggagagacttccgtgactgagccggcgctgtccaggaaccatacggaactcatgctacaaagttttggcgccagcgtatccgccgctatgcatccggacggcagcgccaccgcttacgttcacgcctgcgacgaattatacgggcagcaaatttttgttcccggcgacatctcatctgcagcatactttatcgctgcaggccttctggtcccgggctccgagctgctggtcaagaacgtaggcaccaatttcacaagagccggattccttgacgtatgcaaggcaatgggggcagatattacccgtgtaaacgagaccttcctggggggcgaaggacgcgcggacatcttggtccgctccagcgatctgaaaggcgcaacgatagaaggggacatcatccctgccttgatcgatgagatccccatcctcgcagttatggctgcccatgcagaaggcacaaccgtcatcaaggatgctgccgaactgaaggtaaaggaaaccaaccggatcgctacagtcaccgaaaaccttaaggctatgggctgtaacataacccctaccgccgacggcatgatcatcgaaggaggttccccactctctggcgcccggattcaaagccatatggatcaccgtatcgccatggcattcgccatcgccggcctgaccgccaaaggggaaaccgttatcgaggatagtcagtacgtagatgtgtcctatccagaatttttcgaggcggtagaaagaataagaagtgacacgtaacagttttaactttgacacgtaacacttttaaaaagtgttacgtgccaaaccttcataactggtgtgtataattaaaaaaagccctgcgtaaaagtgaaaaaactggtgcgcagaatgcatatagaatacgaaaaggtaaataatccaagcatatttatttttcttttggattagttgccttttcgtttaatttattgaattcataaagtttaacgcaggacattttacatttttacacaggggttatatcaattttacacaccagtttaacaaagtgaacacgtaacatttttgaaaaatgttacgtgtcaaagtgaaaagtgttacgtgtcaataatacgttactcttacggtttttcccaggtgttctatgcattcccgcaattgttccaccagattcatcctgacgctcaggtcgaatggcaggttggagttctgatgggccgtgttcatagcctttcccacgaacagatttagttccgtgcattcctcgattatcagtttggccagtttggatgcaccattatcggcatccagttcatcaaagaatgcctcgtcaaaatcatcattctcgtaacgtctaagcagccccatcgcttttccaatagtcagcacgccttctgtcaccaaatccaggccttcgatgcttgccgtaggaggaacgcttggatccgcataattcagggacgtgatgatctcttttttcagcaccctggcagtgatgttcgcactggtccctccgcagacgaccttcttgccctcttgattcatgaagtcccggaccacccgctcgtcgtcctccttgtgagtaggaggtcccgtaaatatgttgagaatgcgccgttctatgactctcgcgacggcaaccgtggtatcgtccccgggcttctgcccgtacaggtcatcacaggcttggctcagcatggcggccagccgggatgctgacagagtctccttcgtacacttcaaggtgtattctgccatactttcccaggtccagccaaaattcagaagttctccgacccccgcatagatgacgccgtcgctcataagtacgaaacagtccttaagttttacctgaaaacgatactcccggatggtcttgtcctcaatcaccctctcctcataaggataatccacgatctcgccatcccgcacaaacacacattttggattgtcaaattctgccagatacgcctccccgttgtgaaaaatctgaagaatgctgaaggtggcataggctacttcccgtaccttgcacactggaagcgtcttggcgattgtctctacgcaggcttctatggatgccccctccaaaaacatggttcccaggatcttggatgtcaaggtggccagaatattggcctttacgccgcttcccattccatccgccagtataataatctcagaatcgtccgtcttaaggacctctaccttgtctccacagagttcttcatgatgcttgttcaggcttttccaggatatatctacacttacactcatatcaatcttcctcttcaaacagaattgaatccctcagttttgacagggtcactttggtctctgcagtcgtctctcccagaaggccggcgatttcctgcgccaccatcatctgcttgtcaatgaccttctgcgccatctctaccgtctccatcttcaggttatagtgctgttctttggccttctcttccctggtgatatcctggtacgtcaccagtacggattccaggctttctatataaatgatgctctctaccaccgtcagtttcatggtctccaggttcagtttcttgtgaacgatctgctgtctggtattcaggacttccgcaatatccttgtcgtccaaaaattcgaaaatataccgctccagtgcttcttccctggacactccaagcatctcccgggcttttttgttgcattcccgtattcgcatatccttgttaatgatcatgatcatgctgggcgtcacatccataacgatgttggacattgattccgcctgcgccaccgcataaggcaggcacatgccaatctcggctttcttctggtacactgctgtcgctttggcccggcaagtcggatatccgcaggcgccgcagttcagttcgtcctcttttgtatatttgcccatcgcatgaagaatctgctccatctccgtgtctgaaggcgtgcggtcatggacgcgtcgatccttaaatgtcttctgaagttcgatatctcgtccctcaatgccttgcgcctcttcctgatatgcgacctggtcttccagatccatcttggcccgtaccagggactgctgccatttatcagaggctggtcccttgatgcatccgccctcgcagacattgacctcgaagaagcagttctggatcccgcctttttccagttcttcaaaaagttccatacaggctttcagcccatcaatatgtattttatagtaattgtcctccactgaacttgcacgcacagacttaataatccccccgctgattgggtagagctgattaaccttagggcttggattccccataggaaggttctggcactggtggacatctatgccttttgccttccaccatttcacgatctcttcaaacgtcaggatagcatcgattgccccctgtactctttcatccccgattgcctcttctttcttggcaatacaaggccctaggaataccaccttcacatccggtccgtaaatatccttgatgagccggccatgggcaatcataggagataccaccggcgccatcataggtaccagggatggataatacttctcaatcagatcattgacgctgggacagcaggtcgtgatgatgttgtccatctggccatcttttagaagtttccaatactctctggtcaccagcgcggcgccctcggccgtctcccgcacctcatagaagcccagctgcttcagggcatccacgatctggcccggcttgtcgtattccagcacgccaagataggaaggggcgatggatataatcgtcttcactccctgcttcagataccgcttcacccgatccatgtcgctggcaaatgtctttgcattctgaggacatacttccaggcaatggccgcagttgatgcagtggtccttcataatatgagcctgctcgttttggacggaaatggctttcacttcacagtttcgcacgcatttatagcaatgcctgcagctcgcatccttaaaatctattactcgcactttcccgcctccttcaatatgacctcatggaagaaatcttccgcatcccccggctttacatggtaaatattctccccgatcttcacactgacgcctttggagcaggcgcccatgcagaatgagccgctaagctcgatatccgctacatctctgtgttccttcgtaagcctggtaaatgtctcaataacatccttggagcccctcacatggcaggaacttccaatgcatatcagaaccttcataatgtcctccttaatccgcacatagttacttcttccattataacatcacacagattaaggcgcaatctcgggaaatgtttatttctgcttatgatttctactcaggtttttgatttataattttcacttatactttcacttacagattccactttaccttcaggcatatcctattcctttgccagaataatgctgacaataccgcataggagccctcccacaggaaatgcgatccaactgatgttccaataatttcctacaaaacccagcagaaagaatacaatgactgctatcagcataatcacagagctaatcttcccaatcagggtccccctctttttcgccagtccttcattatgattcttcttattatatttctcaatatcatatttttctttctgacacccaatatagaccagcatggtgacggcaattgtaaccggaatcatgaaaacgcaatggaaaatgtcttcctcaaaccgggcaggcagctgcatttcctccacaaatccttcatagatcacaccgcacagtatcagtccaatcgccacagcaacaacattaatatattttttatgaaacttatcaatttcttctgtcgtatatacatttactatcaccggatatcttctccgaaattcctcatctttcaacccgtgaaccacgaatagcaggacggataccacgcacatgataagaaacagcatatttgcataactttcgctgactcggatccccatcaggaattcgtatatcgtcacgccaagcagtataaaacctacgccaaaggctaccgccttgctgaactcattcttatgctggtcatattgtgcattatcttctgcaaaagactccgtcgcatcgcctctgatcagcgtatccatatcgcatcggaacatctcgcacagctgcaatatcttctccatctccggataggttgctcctgattcccattttgaaatcgtctgcctggatacttccatccgctcagccagttcctcctgggtcatatccgctttcttcctgtaaaactgtaaattctctgaaaatgctgccatatttttctctccgtttcatttatattccaatcgattgtaataaaaagatagcatatcatcagcgcaacctctataaagtccttgttgcttttgcggaaaataacgtaaactttcggttgacatccctaattttatcatattttaggagtctctgccacaaagggaggcggcctacaaccgaaatcgtaggccgcctcattttatatgagattatgtcatcaccaaattaattgatcgtccgcttcacataactcgtatgcagggtctcatgcgccttatggcttcctggctcgccaagatactcttcatatagtttcttgattgctggattctcatgggacttgcggatcggcttagccgaatcattctgatacagcacgcttgcacggattcctcttacatccgtaaagttccttacatcgccggatacctgaggctgtccgcctccgttgacgcatccgcccgggcatcccatgatctcgatgaactggtagtctgcctcgccggattttactttgttaagaagcgttctcgcattgccaagcccggatgccactgccacctttacatccatgcccgcaacattgtatgtagcctcttttacgccctgggtgccacggacatccgtgaaatccaggttcgccagttcttcgcccgtcagcacttccactgcggtacgaagggctgcttccataactccgccagtagcgccaaagattacggccgctcctgtggactcgcccatcggatcatcgaacttctcatccggaaggacggtaaagtcgatgccacagcgcctgatcagtcttgccagttctctggtcgtaatggctatgtcaacatccggcactcccgcggcatcctggtcatccctgccaatctcgaacttcttggcagtacatggcatgacgctgaccgatacgatcttcttaggatcgatgccttccttctcagcaaaataagtcttcagcatcgcgccgaacatctgctgcggagacttgcaggtagacagattctctgtcatatccgggaaataatgctcgcaatacttaatccatcccggagaacaggacgtgatcatcggaagcacgccgccattcttaattctgtctaagagttccgtagcctcttccatgatagtaaggtcggctgcccagtctgtatcgaataccttatcgaaaccaactcttcgcagcgcggctgccatcttgccttccacatccgtacccatcggatatccgaattcctctccaagtcctgcgcggacggaaggagcggtctgaaccactacatatttatccggatctgcaatggcatccagaatcttctgggtgtagtccttctcatatagtgcgcctgtaggacagactgcgatgcactgtccgcaggatacgcagctggtctcgcccagccccatctcgaatgcggagccgatcattgtgctgaatccgcggttgttggtgccgataacgccgattccctgtaccttttcacagaccgcgacacagcggcggcataggatacacttgttgttatcacgaaccatatgtgccgcagaagtatccagttcataatgatttactttgccttcaaagaagttctcatcatcaactccgtactcccggcaaagctgctgcagctcgcagttcccgcttcttacgcaggaaaggcatttcttatcatgattagaaagaagcagctgcaaggtcttctttctggatttgatcagttgcggtgtattggtgtatacctccatcccttcattgatcggatgtacgcaagcggctaccagattcctggctcctttcacttcaaccacgcacatacggcaagcgccgatttcattgatttcttttaaaaaacataaggttggtatcttgattcctgccaggtgtgccgcttcaaggatagtagaacctgcaggagctgatacatcaagtccattaattttaagattaatattttccatagtctccatcctccattactctttgtaaatagcaccaaaacgacatttttccatacaagccccgcacttaacgcacttatcctgattgatgacatgaggctctttgacagcgcctgtgattgcatcattcggacaggttcttgcacacaatgtacatcctttacatttatctgcgtcaatcttgtaggaaagaagtgccttgcagacgcctgccggacatttcttgtcgacaatatgagctatgtactcgtctttaaagtaacgcaaggttgaaagtaccgggtttggagctgtctgtccaagggcgcacagggaattagacttcagatgcgcggccagatcttccagcttatctaaatcttccatcgtgccctgcccgttggtgatcttctctaagatctccagcatgcgccttgtaccgatacggcatggagcgcacttgccgcaggactcgtcaaccgtaaactccaggaagaacttggcaatatcaaccatacaggtatcttcatccattacgatcaatccgccggagcccatcatagagcctatggcgatcaggttgtcatagtcaatcggcacatcaaaatgctctgccgggatacatccgccggatggtccgccggtctgcgccgccttgaatttcttgccattggggatccctccgccaatctcttctacgatctcccgaagagttgttcccattggaatctctacgagtcctgtattcttaaccttgccgcccagggcaaatacttttgttcccttggacttctctgttcccatggaagagaaccactccggcccattcaggatgatctgaggaatatttgccagcgtctctacgttattcaggatcgtaggcttctggaacagtcccttaagcgccgggaatggaggacgcggtcttggttctcctctgtttccttcgatagaagtcataagcgcggtctcctcgccgcatacgaatgcgcctgctccaagacggatatcaatatcaaaatcaaatccggattcaaaaatattctttcccagcagtccatactctctggcctgaccgatcgcgatcttcagacgttccaccgcgattggatactctgcacgaacatagatatatccctgggacgcgccgatcgcatatcctgcgatcgccattgcttccagtacgacatgaggatcgccttccagtacggaacggtccatgaacgctcccgggtcgccctcgtcagcgttgcagcagacatacttctgatctgcctcgtttgccgccgcaaatttccacttcaggccagtagggaatcctgccccgccacgaccgcgaagtccgctgtccagaatcacttggataacctcttccggcttcatcgtggtaagaaccgtgccaagcgcttcatatccgcgcgtaccgatatattcctcgatattctccggattgatcacgccgcagttgcgaagcgcgactctgtgctgcttcttataaaactgggtctcctgaagaggaagcaccttttcattcttaaccgtatcctcatacaggagccgggttacaaccctgccctttaacagatgctcttctacgatttccggaatatcctcttcctttaccattgcataaaaggatccttccggatacacgatcataatcgggcctaaggcgcacaatccaaaacatccggtcttgacaacgccgacctcattctccagcccattttttttaatctctgcttctaatttctctctaatcttctggctgcctgaggaagtacatcctgttccaccgcaaaccaaaacgtgcgaacgatacatagtcttatacctcctttgcttatttctgctcagcgcttaatgtatacttggtaacgacctgtccctgtttcaggtggaggttaaatacttccattgctttttcaggcgtcatcttcacataagttactttatcttttcccggctccaatacttctacgatcggctcatattggcaaaggccgatgcatccggtaggcgtaacgctgatcttgtctgtcaggaattcattctgtaccgcttctgaaagagcggcaagaacaggccttgcgccgcttgcgattccgcaggtagccatgccgacaacgactctggtctgtgtctcgctctcagaacgaactccaaccttgctttggttcttttctcttattgcttttaattcttccagagatttcatatacatcctcccttttagtctgataattataatgttcttccgtcatctacttctgccttgttatcttccagatattcccggataaaccgggatacctcggcttctttaaatgacatcccgcccaacagttccttcatctgcttcgtgtcaagcgtaaattccttctcgtcatatgcatatctataatggaaatcaatctgttcattgaatacgatcagcgtaaacatcgtagaattaatatccccgagcggcatcctgtcaatatgggacaatccaaaaaccgccttcacgcaggttccttcgtttacacgggacgcaatctggaaactccctcccgtgctctccgctgcctgcttaaaaaagggaattccaagtcctacccttctggtggttctggtcgtataaaacggatcggtcactcttctaacctgctcctcatccatcccgcatccgtcatccctgatcataatctccaaggtgtccttttggctgtcggcaatcacgtcaatctctatgtaaccggctcccgcccgtatggaattctccgccacatccaatatattcaatgagatttctggcatcatatctattcatatttggccagaatatcatcgatatcatccacggtaagccggccatacacttcatcattaaccatcataacaggagcaagtccacaggcgcctacgcagcggcaggcatccagcgagaacttgccgtccggcgtacattcccctcccacgattcctaatttttccatcagcttgttatagatatctcccgagccctttacataacaagccgtgccaagacagacagatatacggtagcgtccctttggatttaggttaaactgggaataaaaggtgacaactccatagatcttttccagtggaattccggtttcattagaaatgattttctgaacttcaatcggcagatagccatagatgtcctgggccctttgcagaataggcatcagggaacctttctcatctttcagttcatggattacttctaacagttctttttcttgctctttcgtcccattgaactgaactgtagattttttagaaagcattgtttttacctccctttactatcttttttggtgacaatttggtacattcgcgttgaattacttattcattctatcatacaaaaatacaaaaatctatagttttttcttgtcaattttgttaactttcagacagttgcgtttgatatttcactatcattatgttaaaaaatgtacaatatttttctcggttttttagtaatattatacaaccgcagttgattttcacttatctgaatgatatacttataaaaataagtctattaatacgcaggaggtatttatgacaatcggaagaataaaagccttattagaggcagatgtgctgtatggcgaagacaccttggatgatgaagtgaattacgcgttttcttcagacatgatgagtgacgttctggcctatgctgacgagcattctgccttgattaccggcctttgcaatccccaggtggtgaggacggcggagatgcttgatattgtctgtatcatatttgtaagaaataagattccgaatcagagtatcctggcgcttgcggaagaaaaaggaattgtcatcttatgcacggcgcgaggcatgtttacgacttgcggcatactatacagcaatggactacttggaggtgcaaatatttaatgggtgaaaacctaatcttacattacgacatatcaggcgacgattttacacgtgccggcgaagccagcagcgatgtaaagaacaaactaaaagtcatgggtgtagataacaatgtgatacgaaaaatggccattgccatgtatgaaggcgagatcaatatggtaatccatgccaacggcggaaccattaccgtcgagatatcccacgacagcatacggatgattcttgctgataccggcccaggtatcgcagatattgacaaggcaatggagaaaggctattccactgcccctgaagaagtgcgcgcattaggctttggcgcagggatgggattgccgaacatgaaaaaatattccgactatatgaacattgaaaccaccattggcgtcggcactaccgtgaccatggatgttcatttatagacagcagggagggagaagcttggacaaattcattcattcagtaaaactagacgaagatgcctgcatcggctgtataaactgcattaaatactgtccgacccaggccatacgggtacataacgggaaggctaagatcacgccggaattctgcgttgactgcggccgctgcctgcgctattgcccgcatcacgcgaagattgccatctatgattccattgaagagatccgcaattacaagtatacggttgccctgcccgccccttctctctatacgcagttcaacaatctgaccaacgtggacatcgtcttaaacgcactgctgtccatggggtttgacgatgtgtttgaagtcagcgcggctgccgaactggtatcggaggcgtcccgcgcctacatcagcgagcatcgggacgaagcgccttttatcagcacggcctgtcctaccatcgtaagaattatccgcgtcaagtatcctacgctgataccgcggctgcttcccctgaagcccccggtagaagtggcggctgaaatagcccggaaaagggcgattgaaaagacaggtctaaagtccgaagatatcggcatattctttatatctccatgcccgtcaaaggtgacctacgtcaaatcccctctgggaattgaaaaaagccagattgacaaagtgcttgccataaaagaggtttatcccattcttctggagcatatgactcacgatgagagcaagcttaagcctctggccgcgtctggtcgcatcggaatcggctggagcaatgccggcggagaatccgcaggactgatcaccgataattacctggcctgcgacggcatcatgagcgcgcttcgcgttcttggggatctggaggatgaaaagttccatggcttaaaattcgtagagttgaatgcctgcaacggcggatgcgtgggaggtcctctcactgtagagaatccctatgttgccaccgccaaatccaagaaactgcacagatatcttccagtggcccagactcatgccagcaattttgatgatattgattaccactggaacaacttcgtagaatatgagcctgtattccgcctcggccattccttccgggaaagcctggagatgatgggtcttatcgaggaactgacggagcagctgcccggacttgactgcggctcctgcggagcccctacctgccgcgctctggcagaggacatcgtacgcggagaggctacaagaaccgactgcatctatgccttccatgagtatatcaacacgctctccaaggagatctcattcctcacccgctcgctgaacctaagctgtggcaacaatgacgagtcggtaaggattctggaggattatacagagaggcttacaacagaactggataaaaaggagcgatgattatgacgactgtacagacattgatcgatgccggattatttgccttaaaggagcctggcaatgcatcccgtaagatcgcgaaggtattctgctgcgacctcctcagcatagccatgagcaaagcgccggaaaacggcgcctgggtcactgtcatgggaaacaagaacacgctggccgtggcttccctttcggatgtctcctgcattatcctggcagagggaatcaccttttcagacgaggatctcgcctgtgccaaaaaggaaggaattgccgtttttgagacggaactaccggtctttgatgctgcgcttaagattcaggagctgctgtcatgattcccctgtattatgatcttcatatgcattcctgcctgtctccttgcggcgacgatgacatgacccctgctaatctcgtgggcatggccgccgtcaagggactggatgtgattgcgctgacagatcacaattcctgcaggaactgtccggctgctatgaagcatggagaagaatatggcgttatcgtaattccaggaatggaactgaccacatcagaagaagtccacgtggtctgcctttttccgactcttgacgatgcgctttcttttgatgcctatgtctacgaccatatccttcccataaagaacaaggaacatatctttggccggcagcagatcatggacaaggaggatcatgtcaccagaaatgtcgagcgcctgctgatcagcgccacagatatctcctttgaccgcatattcgccctggtctcttcctaccacggcatcgcatatccggcccacattgacaaaactacaacaagtttgctgtccaatcttggcttcgttccccctgacagcacctttctttgtgctgaaattcacaatatgggcaaccttcaccgcatacaaaaagagcacccttactttctgcaatgcaacattgtcagcagttcagatgctcactatcttgaagatataaatgaaccctattatcagctatattccgagtcccgatccatccccgatattctggccgcactcttacgacgtacctggcgctatttctcccggaagcggtagcccactccgatctccgtcagcacatattcagggcttgccggatccttttcaatctttcttcttaacgttgccatgaatacacgcaggtttccggcatcgatatcctccgcatacccccatatctcccggataatataattatgggtcagaaccttccctctgttggcgatcagcagcagaagtatcttatactcgatcggagtcagatgcacctcttctccttccaccagcactttccgcttctcataatccaccgtcaggctaccggtagagaacacggtcatgatctcttcctgccgggccgtaccggttttccttaggccggcgcgtattcttgccatcagttctcccatatagaaaggcttcgtcacataatcatccgcccccgcatccagggcctgaatcttctccacttcctcctgcctggcagacactacgatgatgggaatatccgaaacctcccgtacgcttttgattacttccatgccatctccatccggaagccccagatccaggatgatcagatccggctgattggcataaaacaggctgactgcctcttccacagacttggcaacaaagaacgcatattcttcctttttcaatgtcatgctgataaaatttataatatacttgtcatcttctacgatcaataacgtcttcttgtcttccatatcttttattccacttgcttggccggaatccagaatataaatctggctcccctcacattcctgttctcctcccaaatatcaccgccgtgggcatgtaccacttctttgcaaatggtaagtcccagcccgattccgcgcttctggtccgtgcttttatcaccgccggagacaaattcatcaaatatccgctccctcagttcttccaaaacgccatccccgtcatcctctattacaaaatatgccttattgtcccggtaggacacgctaagagatatgcttccgccttcttttgtatgcttcatggcattgtcaagcaggttgatgatcacctgggcaatcatcctggcatccatatccgccacgataacctcctttggcaacgatacctggaaattccgcctgtccctcaggccgatcacgtgaagggatgcttcattaatcacatcatcaacgacttccggactcttattgataaactgctgcccgctctcgatcttcgtcatgctcaggatattctccatcatcttcatcagccacatagactgctccataatatcctgtaccagctgggcgcgctcaggcgaatccatatcctcggattccaggatcagcccgcagtcgcccatgatcccggttaatggcgtacgaaagtcatgggatatgcttctgagcatgctgctcttcatatgctcccgctccacctctaccttgatccgctcctgctccgcatagatcatctcccggtcaagcgcgatcccgatctggtttgctgcggtcttgacgatcagctcctgctccacgctgagtccctgattgtggtttaataccttcagtatccctatctgcttcaccatgcctatgatgggaaacatcatgtaatccctggaggtatactccttgcccgctccggataccaccgtctcatccagcagttccacgatgcactcatatcccgtatgctcatagatgtgccgtatgcccagttcgatgatcttttccttgccggtagcattgatgaactgttccgacatctcgtacaggcgggtggcagtctcctcattcttcttcgatatgatcagctgcttctgaaacctgacggtaaggctggacgatataaatgcggcaatcaaaaagaacgccatgagtgccacatcgttgggattcatgatggcaaaggtatgtaccggcaccgtaaaaaagtaattgaatatcagcacgctggagattgcgccaaagattccatattcatacccccaggtacaggtgctgaccagaaggacgcccaccatgaataccataaggacgttctccttggccactccaaatcgattcaggatcagtcccagtatgctggctgttatcacgatcgccgccgtctctgccatatatgctatttttttattttttaacagcgctcttatcttctccatttacccatcatagcatcttacttgatatttgccaatatcttgtctacgtctttcttaagaccgatcaccataagatgaatgctgtcattcatcttgtagtcagcccttggaagcagctgcagatgcccgttctccttgattcccagcacgcttacgtgatatttggagcggatatccacctcccggatgcttttccctatccagctgtgcattggcggaatctcaaagatggagtatccttctgccagttcgatatagtcaaacacatggttggcgctgtgcttgactgccagccgttccgcaatatctctgtcaggatatatcacctcgtctgccccattccttaacaggaatttggcatgaatgtcacggtttgccttgcttaccacatatttccctcccagttccttaaccagactggtaatctccaggctgctctgaaaattggagccgatgcacacaaaacagatgtcaaagttccccacccccagattcctaagtacttcctcattggtacagtccccaatctttgctgtcgtcgctatgggcagcaaatcctccacattcgcctccaccttgtctacaaccatcacttcatttccaaggcggatcatattcttgcaaagatgatgcccaaaccttcctaagccaataattaatacagatttcatctttctctccccaatctattttattctagcctatggtaatcggttctaccggcactttcaccggcacttcggctttatgcccccgaagcgaaagtgcgaacgtcaggcttccaacccttccacagtacatcaaaaatactaataccagctttgaaacctccgtcagatcccgcgtgattccggtagacattcctaccgttccgattgccgacgctacttcaaatacgatatccatcaccggctgcggctggatcgctgccagaatcatcactgccatgaaaaccagaaacagattcgtgcacaggaccgtgctggccttgcggattgcgccgtcatccagccttcggccaaatatattgcaataggtcttattccttagattggcgctgacgtagacaagcaataccacgaatgtggtggttttaattccgcctgccgttgacccggggctgcccccgataaacatgaggaatatggtaagcatcttgctgttatcggtcagcgccgccgtatccaccgtattgaatcctgccgttcttgccgtcacagaaccaaataaggaacttagcaccttcccttgggtggacattccttccagcgtgttctggctttcaaacagatatagaagcgccgcccctccgattaccaggattgccgttgtcaccagcacgatcttggtatggagacggtatcggctgatatgatagcggtgggcggatacgtcattccagacgaaaaatccaatgccgcctatgataatcaaggccatgatcacgatatttacaagcgggtcatcataatacccggtaaacgaagcatagggggcgtcttttcccatcagatcgaatccggcattgcagaatgcggaaatggagtggaagattccataatagacagcctttccccatcccatctgttcctggaagcgaaacgccagaagcgcggctccgactccttcaaacaggagggttcccagcatgatcttttttgccagtcggacaattcctccaatctgcagaatgttgacgctctcttgcagcgtcccccgcatccatagtccaatcttccttcggaggatgatggcaaagaatacgccaatggtcataaatcccaggccgccaatctgaatcagcgccagaatgatacactgtccgaacatcgtccatttgttaaacgtgtctgcgattaccaggcccgtcacgcaggatgccgacgtggctgtaaaaagggcatccggaaatgaagttgcaagtccgtccctgctggccgctggaagcatcagaaacagcgaccctattaggatgatcagcgcatagccgataacaatcatctgtgtctgcgtcagtttacgaatcataactttcatgctatcacgacctcgtttcccgacatagcattttccagctgctctgtgatcttgatatcccggttcagcacctggatatgaaaacgcttgtatacgatataattcacttggtcgttgcagataccatacagttgttccgtatggtatatctttcgcagcaggttacagacggaaagattgtcttcatccgaggaagatatggcaattacaagactgacattcttccagtcttttttcaggcatgcttcttcaatgaataccggacgcagccctctgctcttaagccatcctccaatctcttccgtccactcgtcctctccaaacacaaccgcgcaggattcctgcgactcgttttgctcctcatctgcctgtagtttcttttcttctcctacccagcgatccagccggaaggtcaggtagtatccatatccggcggctgctgcagtaattaaaattaatagaatattcgtcaacatatcatcaccctcttcttctacctatagcataatctactttgcattaagacggtaataatattgaggaatccgtattaagattccatttagaccgatatttttgtttctctcttttcctagccgatgcgcccctcttccatatagccggccagttctttggcaaaataagtaagataactctgggcgcctgcacggtacgcggcaactgccgtctcgcagacaatctgcgcctcatcaatccagcctttttgtgccgctgccttgatcatggcatattctccgctgacactgtaggcggcaatcggaagatttgtggcctctttcgcgcgggcgattatatccagatacgcaagcgccggcttcaccataataatatctgcgccttcttcttcatctaaaagcacttccttaatgccttccctgctattgtgataatccatctgataacttttccggtctccgaaagccggagcagaatcagccgcatccctgaatggggcatagaatccggacgcatatttgacggcataggacataatcggcgtatttacataattattttcatccagcgtctttcttatggcctttaccctcccatccatcatatcggaaggcgctaccatgtcagcaccggcctgcacatgcgacaacgccgtcttggcaagcaccttcagcgtggagtcattctctacgctgctgccgcatagcattccgcaatggccgtgggaggtgtactcgcacaggcatacatccgtaatatagtacaagtccggaaagcgtctcttcgcctccttcagcgccctctggatgattccatcctccgcgtatgcctggctcgccttctcatccttatgtgcgggaatcccgaacagcataaccgcattgacgccggcatcgcttacctgttccagttcatagaacatctggtcaacgctgtatctgtactggccgatcatggaaggaatctcttctcggattccctctccttctcttacaaacattggatagatcagcgaggatttgtctatcctcgtctctctcaccattttccttagtacttcattctgccttaatcttctaggtctctttatcatctttctgtcctaatcctttctatcagtgttatcaagtcgtcaatcgtggccttgctggccacataacaatccaagccgtatttttgggccgtacaggctgtctgcttcccgatgcatgcagccttgatcttcgaatagtcggcgcccttactgacgtcggcaaatccttcgaccgtggaactgctggtaaacgcaacgcagtcaatctttcccttttcaatctcttccttcaggtcgaaccctttgcattgctggtatatagtggtataaatcggaatatcatccaccatggcttttgcctcctgcaaaatcggcaccagctgcggattcgctatggccgctcttggcacaagtatcttcttttcctctatatcctgcccggccagcagccttgcaagggacactccgtcatagaccttaggcatcagatctgcatgaatgcctttctgccttaaggcccgtgccgtcccttcgccgatcacggcaaattttgccgcatgcaggcggcggacatccaccttcgccttctccatctcctcaaagaatatacgcacgccaatctggctggtaaaaacaatccagtcatattcttcgatcttctcaaaactctgcctcagccggtggttctccttcaccggaatcgtatcgattgccgggacttccagcacatccgcacccagcagccgtaacttctctgccatagatgacgccagttcccttggccttgtcaccagaacccgcattcccatcaggggaagttcttcataccaggaaagcgtctctgacagcgcgcatacctttcctaccacaataatcgcgggcggacgtatgtctgcctctgttgcagcatccggcagacgcgctactgtggacaccaccttcttctggccggcagtggttccatcctggagtaccgccgcaggcatctcgggatctatccctgcttccagaaggctggccatgatctgcggaagcgctgttacccccatcaaaaataccagcgttccttccgattccaccagtgcccggtaattgaccggctgttcctgtccttccttctgatgcccagtcacgatatgcagggaagatgcataatccctgtgggtaaccggaattccattgtatgccgggactgccagggaagaggtcactcccggcactacctcaaatggaattttatggcgcgccagttcctccaattcttctccgcctcttccgaacagaaacggatccccccccttaagccgcgctaccttgcagccttttttcgcctccctgaccagaatctggttgatctcctcctgtggtatgggatgatgtcccgccacttttccaacgtcgataaaggtcttctcctttcggattgacgccaggatatccttgccaaccagatggtcatatacgactacatccgcatcctccagcactgcctgtcctttcaccgtcataagtccgatatctcccgggcctgctcctaccagccatacttttccctggcatttctgtctttgttctaaatcaggattcccatattctgcttccatgctgatagccagctcccttccgatcttctctgcttcttctaccgggccgcttttcgaaccgatggcataattccctgtctcttccatatagtaaaggcctttcatcaagagctggccatctatcacttccccataggctgcgactggcgaggaacagccaccgtccagataccggacaaaagccctttcccccttggcaatatatgcatcttcttttttgccgtatccttccagaaaatcataattcatgtctatcctcccctgcaccgccatcgttccctgtcctgcagcaggaaggatctcatccgtggaaaagtaccggctgatccggtactcaagccccagccttttcaggcctgccgctgccagaatcagcgcgtcatattctccccggtcgagtttttcaagcctggtgatcacgttccctctgacgcttctgaactcagcctctttaaacagcctctttgcctggatccttctcctgaaggaggagcagccgatgatcccgcgtccatcccattcttccacgccttttggaagcaccagcacatcacgcacatcttctctgggggaatatcgcacgattggaatcacctttgattcatccatcggcatatctttcaagctatgtactgccagatctatccgtccgtcaagcagcgccttatccagttccttcacaaacaggccctttcctccgatctgatccaaggtcacatccagacgcttgtcgccggttgtctccatcgtcatcatttccagttctatcttgggatggctgcgcctgatatgctccataaccttttccgtctggataattgccagccggctctctctgcttcctactacgatctttctactcatttgtacttatatcctctttttctaaatcttttaacgccagcctgatctgcccggccgcctttctagctttggcatgatcctggccgctggctgtaatcccggccacaacattgccttggatggcgactgcgggaaagtaaaaatcgcacagttccttcttgtgcgacgtattaaccagaatccctcttttcctgcagcatctggcaacctcctcattaagggccgcatcatcggtggccgccagtacgatatccgccttatccagcaggctttcatgataggtacctctgtaccacttcaacactttgtcccgctcaagctgatggatctcctcctctgcttccggggaggcgaccaatatatccgatgcaaacgcagccagcgtgcacgctctccttgcggcgacctttcctccgcctacaataacgattcttttctctgacaaatcaacaaacatgggaaaaaatggttttttcatatgcatccctttctttcaatcacttttactatcatagcataggttatgcaaaaaatcagcatactaattgcatcacaaatatcacagactaaacggagacgatacctattatggacaatgctatattacaggaactctacgattattataaagaagaccattctctttcccagtcggaactgatcatcgccatgctgacgcggatacaggaaactgtcggatacgtatccaaagacgttcaggaagaggtggcccggctcacaggagtaaaccgcggctatgtggctgccatcatcaagaatctgccccatctgcatgcgcaggcattccgccatgagatccgtgtctgcatctccgacagatgcaaggccagaggtggttccgaccttttgaaaaaactgcagaaactcctcaagatcaagccaggccaagtgacaaaagacggcgtttttcttctaaataccgaatactgcatgcacaactgcatgcatggccctaacataaaaatagatggacgaatttatgagaatgtgcagatatcccaattgccgcaattattggaaaaactccggcattaaccgtttgacagtccctctcctttattgtaagataaaaattatcaagggtggattccagcttattccgccgatgttattgtagttttttaaaggagagaacatacatggacaaaaaaaagggaattctcgtggtcagttttggaaccagtcatcctgtgaccagggcagccacaattgaagcgatcgaagacagcataagcaaagcctttgctgacatcaaagtataccgagcctggaccagtaagatgattatatctaaaatccaaaaaaatacaatggaaaaaatacccacggtaaacgaagcgctaagccagatggccgcggatggaataacagatgtctttatccagccaacccatgtgatcaatggaattgaaaatgacataatgaaagcggatgccttaaagttccgggattcctttgattctatttctttcggagtaccgctattatcctctacacaagatatggaagaactggttcatattattatagaggcatttccgtctctgggaaatgatgaagttctgatcctgatgggccatggaagcgaacactatgcgaatatggcttatgcagcgcttgactatatgtttaagcagaagggatactcccagatctacgttggaacggtagaagcttacccttccctggaacacattctttgtggactgccgggcaagggcataaggagaatccatctggcgccccttatgatcgtggccggggatcatgccaccaatgatatggccggggattccaaagactcctgggccagcatatgtaaagatgccggctatgatgtagcctgccatctaaccggacttggagaatatgttgccatacgccgcctttttatccagcatctttccagcgccttgaatatataaaagagccatctaatcgactctttctttttccataccgctctttagttcttcaattgttctgggaatcggcttcacgccatagatttgtcccacttggaataatagcggctttttcagcctgcatctctccagcaattctttacgcgcaaaaatctcttctggctggccgtctgcttcaatgacgccatcatgaaaaatcagaatcctttctgcccattcccaggcaaaatcgatgtcatgggtagcgatcacaagtcccattccttgcccgcttaatttatcaagattctctttaagcattccgcaattaaaagggtcaagactagatgctggttcgtccatcagaagcatccgaggacgcatcgccagcacatctgcaatgctaacccgtttcttctctccaccggacaaataatgaggcgcccttttgcgcagcgtcttaagccccatattgccaagggcatcttctaccctttctcttacatcatcttccgatatcttcagattcatcggtccaaaactgacctctgactcaactgtacctgcgatcaactggctgtccgcctcctggaacaccaatccgattttctggcgtagttctgtaatttcctgcttatcccaatggatttcttttccttcaagatagaccttgcctttctgaggcttcagaatcccgttggcgcataagaaaaaggtgctttttcctgctccgttattccccagcagggcaaccttctctccctgatgaattgttacatccacctgttttaaggcttccctttccccgtcataactatatccaacctgttcaaaccgtaatatctctaccatcttactctcccatcacagacttatctgaccatcacgcacaataaccattccaagaccgcaagaaatatagcgcctgcgacatatgccggctgccattttctctccggatccaaaaatcggatgcttccatcaaagcaacggctttccatagcgtcaaaattacggctggcctggcgatagctgtatgccagcaagtttgaataaattcgccctgtagtccggatgccggtaggataatcaatataccctagcctgctcattgcggagttcttcatggaatcatgtatattgaatagcacaaagatatatcggtagatcagatacatcaattccgtcatcacgtccggacatcgcatttttctaagcacacctataatctctggcatcggcgtgctcagactcagcagatataatgcgctgaccgctcccaatgccctggccattacaagcatagtcctaacttgcgccgcctttgtcacgcacagatatccgatgccgatagaaatgctaagattccctttatctgcgggattatattcccacaaaagcgcaaggccgctgatcatcagaaaggataggggcacagcgaccatatggagatatgtctttacgcgtacccctcccgctatgatgctaatcagcatgagcagaatcgcgatctgtactcctatcaccggtctcccggcacagatactgcatgccataagactaacagcaagcaggaacttaagaagaggcggcacctcggacagccgggaacttcctgccagcaggtcaatctcgaccctttgttctttcacatgccctgcccacagaaacaatcctgcggcgcagatgcttaacagcagcaatgccgcgtttgatatgtaattgtaaaacaggcaccagactacgccggctgccaggattcccgtaaaaatcattctttattcttcctgtttcatatatttcttacgcgctgccagatatccaaagcaatatgagataatgccgactccaatccccgtctgcacgcagaatatcaggctctcgatctcccctggaatctctcccccgataaagttctcaagaatcggggtgaaccatggcgtgtattccttgcccgtcacctcattgaccatctggcttccggcatcatcgcttccgccaaactcggcgcccttcaatgcgataaagggaacaacgatcagtaaaaggctcacgataattagaatggttacaagtttcttgtttgatttcctgctatctgacatcagcgttctcctttcctataaaaccgattgcacggagttccggcgcagcaaaactttccatacccatcacgatcaatacggtaagaattccttccaagattgcaagcggcagctgcgtgggagcaaaaaccccaaggaatttgactgcgcttaaagccacgcctccgctggcgcttggatatgccactgccagctggatgctcgtcacgcaataggtcagcagatctcccagacatgctgctaaaaatatggtcgccttcctgttccagtttaatttcttaccaattgcataaatgccaaaacttaaaaacggccccgcaattgccatgctgaatgtattggcgcccagagtagtcagtccgccgtgcgccagcaggattgcctggaataacagcacaataatgccaagcacgctgaccgccgtcggtccaaacagaatagcccccagccctgttcctgtcatatggctgcagcttcccgttactgagggaatcttaagagatgatataacaaagataaacgctcctgacatagcaagcagaatgagtgcctttctttgtttctgaacggtatggcggatgctgatcacgcctgcagccagaaacgggatgctgacggccccccatgcgatgcagtgtcccgccggcagatacccttccataatgtgcatagcctgcgaatcaaagccacagacatacaaagcagcggcaaatacggaaaagagccatagtctcttttcgacttttgtccattttttcatgttgtttcattcctcctagtttgtatttttattagggatttctttcctcacgttggaatctatatttttacatatgaaaaggctatggcaattatttcatttatcgccatagccgtatttctatgcaaataaaaccaattgctccatccattccatgaaacaatcagcaatccctcttcttgtaggtcttctgactcgcgcttacgacacttgcttgaagtctcagcgcctgcattctgccttctcggtttcccaatgactggctttcgccaacgaattacaggctcggcgcatacagcggcggtaccgtccaggattcgcacctggttcccttgtccattcatattgctgttaccacaatatgaccacaataagttcttattctatttcgtccgttttaaagtgtacaccatcttccatttaatgtcaatgcaattcaaaacgcccgaaatacctgtccgtcaggccttcatcttccccatttaccaccagatgcatcggcatccccatctggatcgtcatcattcccattaaagattttccgttaatgacgactctcttatccgaaacatcttttacatctatatctgacttcattttctggcacgccttgcagaagcttagtatctgtcctggcgtgacaaactttactgtcttttttaccatccttataacctcctcttttccttataccttttgtagtatataatgagattcagaaattgtataatacatatatgaaatagttgatatatcatatatgcataatggaggtattatggaaatcacctatgattactacaggatattttactatgtggccaaatacaaaagtttctcaaaagcggccaccatactgatgagcagccagcccaacatctcccgctttatgagcaatctggagagccagcttggctgcaagctcttcatacgttccaaccgcggggtgaccttgaccctggaagggcagaaactgtaccaccatgtctccatcgctttccagcaccttcaggctgccgagatggaactggctcaggaccgaagcctggaacatggcatcctgaccctaagcgccagcgagatcgcgctccacttactgcttctgcctgtcctaagcaaatttcaccagacctatcccggcatacggctgcggatctccaaccattccacgccagaggcgatacaggccgtcaaatccgggaccgcggatctggccgtggtatccacacccacggatatccatgacccgttaagggcacagttacttatgaaggcctcggatatcctggtcggcaaccggcagtatgattttctgacaaaagagccggtacatctggcagaaattgccagatatcctctcatatgcctgggcaggcacactaccacctatgaattctactacaaattctatctggagcatggcctgattctgtctccggacacagaggttgccactatcgatcagataccgccgatgatcctgcataatctgggaatcggatttcttccggagaaactggccagagatgcgatctcccaggggaaagtggtcaagatccctttaatcgaacagatcccccagcgtgacatctgcctgattgaagacagaagcgcgcctttaagcattgccgccaatgctctaaagcagatgctcctgtcctgcgtaggccagagccagagtcaggatctgtccagcatataaatcaatgcattgcagatacaggcggcaatattgcttccgccttttctgcccctcgctacaatatagggcgtatcttcaaggcttctgatcagttctttcgactgcaccacgttcacaaatcccaccggaactgcaattaccagttccgggcgaatctttccttctcgaatcagttcatagagtcggatcagcgccgtaggcgcattcccgatagcaaagatcagtctctcctctaaggcacaggccttttccatgcttgccacagccctggtggttcctttctcttttgctgccagcgccacgtcttcatcggacataaagcaatataccttcccgccatacccttccaggcgtgttttgttgatgccggagcggcccatctgtgtatccgtgacaatggacgctccatttcgaatcgcatgcagggctttttcgatcacgccttctgagaataacagattccttgcatagtcaaaatccgcgctggtatgaatgcatcgctttatgaccggcgcctgctccgccggaaggcagattccttcctgctctagttctttcgtgatgatagcaaaacttctggcctctatgtcttgtggaagaacgttttcaatttcgatcttcatcccgtcagattcccccttccaatatctcatatattttcttcatatccagatggctccgaaggccgtctgcaagcagatcatactgtctctctttgaagtccttcagatccacagccttcagatcatcaaggatcattccttttcttgccgccagcgcgcggacaacggctgtcaccacgtcttcccggtcaaagattccatggatataggttccatatacattccccatggaaactccgtccatgctttggcgcgtcctttggctggctgtctgctttccggcgcagtccttgatctcgcacatggctggcaggcctgatctcgtatcgcccatgtggatctcgtatccttccaaagctatgccctccaaccctgccagaatgccttccaccttcaggaatcttccgtccacccgggttctggtcttttccttcgtaaatatggtctccaacggaagcagccccatccctttcatcgtgccgccggcctcgattccctccggatcgcgtaaaatgtcgccaagcatctggtatcctccgcagattccccagattaccgttccatgggatgctgcccgcaccactctggcttccagtccgttctggcgcatccagcgcagatcttccatagtgttcttagtcccgggcaggataatcatgtccggagagccaagttttgatggacgatccacatatcttagggacaccccattcagattctcaagaagcataaaatccgtaaaattagaaatcctgggcgtgcgtatgactgcgatatcaatgcacgcgcattctttttgtccatggaaccgctccgtcaggctgtcctcatcttcaatctccacatcaaggtacggcgcgactcccaccaccgggatccccccgcgctccgtaagcatgtctatacccggatccaggatcgtcttatccccgcggaacttgttgataagcagccctttgaccatctctttctcatcctcgtcaagcagcatcaaggttcccagcagttgggcgaaaacgccgcctctgtcaatgtcccctaccagcaataccggggccttagccatctttgccatccccatattgacgatatcgtcttccttcagattgatctcggcagggcttcccgccccctcgatcacgataatatcatacatttcatccagttggcgaaaagccttcctaatatccggtatcagctgcttcttataggcaaaatactctcttgcgctcatgtttttttgaacctcgccattcacgatcacctgggagcccatgtcattggttggctttaagagtatcgggttcatctgcacctgaggcgcaatgcctgccgcctctgcctgcaccacctgggcccttcccatttccagtccctcttccgtgataaacgagttcagcgccatattctgcgacttaaaaggcgccaccttgtatccatcctgtctgaatatccggcacaatcctgtgcagatcagacttttgcctgcattggacatggtcccttgtatcataatcgtcttagccatgctgccatcctttcgttctcctcttttgtgcggaccgcaatccggtagtatcccggcgcaagcccttcataatttccacagtccctgatcaggaagccttccttgagcgcctcctcataaagcccttcttttgcctgaaagaagatgtagttggccttggatccgaacacggggtatcccttgccagacagcacttcgatcagatctttcttctcgttttccacatagtccctggtctcttccagatactctccacaatcctttagggccgcgactccgcaggcctgggccagtaccgacacgttccatggctgtatggcatccgccatcctagaaagcagcccctcatcagaactgatcccataaccaagccgcaggcccggcatgcagaatattttggtaaatgccttgatcagaagcaggttgggataggttccccttgcgccggccatctcatacttatggggctttggcagaaagtccaggaagcattcgtccagcaccagaagcacgccgcaggcccggcatttatcaagaatcctgaaaagcaagggcttatccgtcagttctcccgtcgggttattgggattgcacaggaacatcatgtcaatgtcctttgtaatctcccccaggatatcctcctttaccctgtatccgtcagactgggtcagcctatagtaccggatgtccgagcctgacgccacaagcgcccgggcgtattccgcaaaggaaggcgctaggagcagcgcctttttcggacgtacggccagtaccgccgcaaaaaatagttctgctgccccgttgccgcagatgatctcgccggacgataccccctcaaagcgcccaatcgcttcttttagttcctggcagcatatatccggataatgcacaatatcccccgcatgctcatgaagcgcttccagcaccgcgtccggaggtcccagaggattgctgttgacggaataatccgttgcattcctgttcctgtatatgtctcctccatggatctgtacctgcctggcctggccattcattctttccttctccaccttgtctcttcccttctcttactctttaaacggtcatcagcagtgccaatatggcaatctttaccgtcagaaatgctcccgccgccagcactgccgtcccatatagcagtttgtgggatcttctgatatcttctggctccaccgcccttatcgcatcgccgatgctgggcttctcatacaattttccaaaataccacgcatttcccgcaagtttgatatccagggctcccgccatcacagactctgtctgcgccgcattagggcttttgtgattatggcggtccctctggtagatgcggatggcattgcgccaatccaggccccaaatgcaggccgcgccgatcatcatccaggcggaaagcctggctggtatataattggccgcatcgtccagcctggctgccgccgtgccaaagtactggtatttctcattcttatatccgatcatggaatccatcgtgttgatggccttataggcaaagccaggcacggcgcctccgatcatcatgtaaaacaagggggcgatcacgccatcggaagtattctccgccaccgtctctacagcggcttttgtcactcctgcttcgtcaaggctgtccgtgtcccttcctacgatcatggaaactgctttccttcccgcttcaagcccttcttcctttaatgcccggaataccttgtcactctctgtctttaaggactttaccgccagaatctggtagcacatgaagccttccgccaatattccaagccaccattgtatccgatatgcggcggcgagaatcaggatgggcgctgccacgctaatgcctacgcaggcagccgccagtatggctcctccgatcctctcgccccatttagatttgggcaggcagtttcttataattctttctaatattgtaatcagctgtccgatcatccgcaccggatgatagagccatctgggatcgcccaggatcagatccagcacaaatcccatcagtaccgggcaaatcattcgtaataacaagttcatatccttctccatttcccacctgaaactcaaaatagctgcctttcgggcaggcataagcatccataatgctcatgatcgtgcctccatgcacgataagagccgccttctcttcctgtgtctctctcatatcttccagcactttatcaaatcccttcagactcctcttcgtgaatgcttccttgctctccccttgcggaaaaggcagcgtcccgttgctgtcaacccactgctggtaatacgggtatccggaaagttcctgataattcttattctcgaacaagccaaaatcgcactctgccagttcctcaataaccatgggccgcatatccggatagatgatgccagccgtctgaagacatcgcttcataggacttgcatagaccttgtccacccagggatatgtcctgccttccagcagttttactccctgcctgcataagggctcatctgtccgtccgatataccgcttccatcggttgccctcggtgatggaatggcggatcaaatagattgtcatcatcccttaatcctcgttccaattccgcaggatacccgccagacctcttttgcgttcgcggccaacttcgtgcatactctaccggctgcctcccggtattcccgcaaaaaggcgtctgccggcacgattccatagccgatctcgtcggttatgaccaccgccccggggttccttcgcatcagcttctccgcaagatcatccacatcctgccctttttccagcatacgccggatataagcatgaaatcgtaaaatgccctggcactcatagagatcctcaagatcgcacgactccccgtctgcccacctgatctttggaaaaaggctctctgcaaatgccgccttcccctgatatgctccgccaataatcagtatcatcttaacactccttccacaagaaccacgcaggccgccataatcaattcacacatctgcaggaagtatcccgccagatccccggtaatcccgccgaatttcttaagggacatgcgataataatacagatacattcctcctgcccccagaagcgcgcctgcacctgcaagtcctcctgccgccagcatcgctgcgatcagccctgcaagatataagagcagaacgcttctggtggctttcctcgccgcattctgggaaaatgtggcggcaagccccttttgacgcgcctgcggaaatgtgatgaccgacagtccgcttaaggtcctggataacacgaatccgaatccaatcaccacgacagcatgggaagtcagggcagaatagactgccacatacatcatcagatagactgcgcaggatataatcgcaaaggctcctgcatgggaatccttcaaaatctccagcctgcgctccctcggctggtaagagcctagggcgtcctgggtatctaaaaaaccgtccatgtggattccgccggtgatgatgattggagccaccaccatcagtatggtgaaaaacaggcttccataatcaatcccataacttgcgagccatcgttccagatgataaatcccccatgttacgatccctataacgccgcctatccacggaaaaaaacacatagcataggatgtattttcctctgtccattcgctgtgcggcatgggaatcctgctatacatggaaaatgctattttaaaactgttccataatcgtttcatgatctctttatctccaccggtattccatagacgacctccgttaccatatccgccatgtcagcgatcttctggttcacctggcccataagagtacggtattcttctgtctccttgctatagtcattcacatcggaattcacttcattcgtcacgatagccagacgatctgtatactccgccagatgccggatgccttccaggattgcatcccgggtttcctttacatcctttatccttccatgctgtccatagagttcgtttgccgcaagattggagacgcactccagcaggactccccggttcccggggatagcggcgcctgccaggttccttggacactccattgtgacgaatccctttccttcccgcaggcgtctatggcgcaggatctttgccattgtctccctgccataagggatcatggtcgccacatagatatatgcgcctttttgggcttcatctgctgcttcaagaagccagtcttctgcataggcggacttgccgcttgcgctccctcctgtgatcagatgtatcatgactcttctcctagttccttatagtcttcaatcttgttttcactgaatgtactcatcttccggtacacttccgctgccatctcaagaatcggcagatacgccaccgcgccggttccttccccaagactcatgccgcagcacaagggcgcggacatgtcaagttccttaagaagcgcctgcatccccggctccttcgatgcatgggaagcaaggatgtatccgcttgcggccgggcacatcctgactgctgccaaggctgccgcagcagatatgaatccgtccatcaccaccggaattttgtagtatgcgccacccaaaaatatccctgccatgccgcagatgtcaaatccgcctacttttgaaaggacatccagtgcatccgccttatctggccggttcacagcgattgctttcttgattgcttcaacctttcgcctaagtccatctgtactaagtccggctccccgcccggtcatctgctctggcgaacatccggtaaacacactggctatcgcgctgctggtagtggtgttgccaatccccatttcaccggtagccagaatctggtagccttcatcttttgccttcccggccagcttgacgcctgtcatcactgcctgtacggctgcttccctggacatggccggttccaaggcaatgttcctggttccataggcaactttataatccggaaccttcgtaactaccgccattccaatgtcaatcggaaacagatccactcctgccttcttgcacatgatcgccgcgctggtattgccggtaaggaaattctctgctacgatcgccgtcacttcctggccagtctgcgtcacgccttcctctaccacgccgttgtctgcgcacatcacgatcagcgcctttttatccagacatacgtctgcattgcccgtcatgccggcaatctttataatatcttcttccagccttcccaaactgtggaggggcttggcaatggaattccagcgttttcctgcttcttccatcgccttcctgtcaatgggctctatactatctattatcttctctatggtcatcattcttcctctttctgcatgcttccagaaatgctctggcaacttcctggtttccagcgtaatggatatggggatatcctgcaagcatagtgtccgtgctgaccatgcatttccaggaacgctcagacagcggcttcctggccgtgtacccttccccgcatctatcagcgtcataataatggaattcatgagccggtatatcgccgacatcttttccaaatgcctgcccgcccgtcaatgtaatatatccgaaccgcttaagccttggagtgggatagcattttccttccaggactccagccatgggatagcgtttcccttccgcgtcctccatctcttccatcagatacatgaagcctccgcactctgccatgcagggcatccctcctgtgactgcccggcgaatgctctcacgcattccggtgttcctgcttagggcccgggcataaagttccgggtagccgccgtatagcagtaggccgtgcagatctgccggcaaggccgcatcatagagaggggaaaagggaaccaggctgattcccctctcctgaagcaggcggagattctcctggtacataaagcagaaagcctcatccctggcaagtccgacccgaacttcttcagatctgcctgtcttcctattcctgccgcttgcctgctcttcctgcacctcctgcacctctatctctggcgcggtctctgcaaggctaagcatcctgtcgatctctagagtctcttccagcgtccggctgatccgaagcagacgctcttcaagtccatctacttcatgcggcatcttcaatcccagatgcctgctctcaagctcgcagtcctcaagtacaggcacataccccagaacttccgccctcgtttctttttctatcatctctttcatccgcccatacatcatcggggacaggcggtttaagataattcctttgatatggctgtcttcctggtagttaagaatcccctggatcacaggtatgacagacttgcttgcccccttgcagtccacgatcaataccgccggcgtatccgtggcatccgccacgtcataggcgctggcctcgcaggatattcctcccaggccgtcataataccccatcaccccttcgatcagggcaatctccattccccttcctcttcttgccaggatggagcgcaccttgtccctgccgcacaggaacgtatccagattctcactgtccatccccagcacagttttatggaacatcggatctatgtaatcggggccgcacttaaagggagcgcattttacgcctcgattcttcaatacctgaagaatcccgcaggtgatcatcgtctttcccgttccgctgccgcacgctgtcatcatcagtcttggcactcgaattatgctcatgcttcttcatccttcttcccatgcaatgtaaaactaatcaccgtcaccgggtttagcccctgcatcatatggtacctgccggccttcttcgatctggacacggcgatctggacgatctcttcttccgtgactggcagttcctccatacagcgctttacttccgctaacgtttccagcgtgatcgtattaatgactactcgtgcctttttattcttgcgatagaccgtatccaggattccttccagattccccgcgctgccgccgatgaatacgcagtccggcaccggaaggcctaacagcgcatccggggcctctccctctacgatcaccagattatctgccttcatcttcttctggttcttttcaatcaatgcgacggcctcttcctttttctcaacggcatatacggttccatccgtcaccctaagcgctgcctccaccgctacggaaccggtgcccgcgcctacatcgtagaccacggaatccttcgcaagacgcagttttgagagagagacgcttcttacttcctctttcgtcatagggacatctccccgcaggaattcgccatccggcaatccatgcactgccattcctttgcacatatcaggattctccacatagattacggccagatctgccccctgatatacctgaagggattctgccgttccttctatgatcttctccgtgtcataggaaagatctgcgcctacgcagactttcagacccccatatccgtattctgtcagtttcctgcaaaggcttcgaacactctgggccgatcctgccaggatcaccgtcttttcatgctccctgactgctgcaaggatatttccctgccttccatgcaggcttcttagtgccgcatcctcccaggatacgccgagtctcgcgcaaaaatacgccacggaggaaatgcccggaatgaccctggcctctatctgaggctcggcttccagcctcttaagaagcctggaagccccgctgtagaatcccgcatccccggacaaaagcacggcaacgttctcatattcgggatgttctttgatatagctgacgatttcctccggctgatatgaagcatacgtatgctgccgctgatcggctgcttccagcatcctttttgccccgatcagcagacgggccttcttgcacgcctctttcccctctgccgtcaaggtctccgccgttcccattccgattcccaccagagaaactttccacttatcctgtaaattcatttcatatttaagaaacttaataacttcttccagactcattcccgcttcctgtctgggccttccgatcaccaccaggccaacgccggccatggctgctgcctcgcatttttccggatatccgccggcaatgccggattccttcgttaccagataggaaatcttatattcccttaacattgccaggttcatttccacagaaaacggtccctgcatacagatgaggtggcggccccggattcccagttcctcgcacttaactgccacatcccctacagacaggaccctggcaaagatacgtttctggtaatcggtcagcctggtatagttctccagttctttgctgcctgttgtaaccagaatatttccgctggtaccctccaggtattccacggctgcctccacatcctctacgcgcacagactcccctgcctgccctgcctccctgagaagccttatatatggggccttcacttctatgcaggcatgcttgatgttctctgtcacttcctttgcaaaaggatgcgtcgcatctaccacatagcggggttcaaattcctttatgagttccttcatctggcattcgtccagcctttggtgggatatgctcaaaagcctgtttttaggaagcaggctctccccatagggcgttgccacgcatgcatggactttgactttacgctccaccagatattctgctaattctcttccctctgttgtccccgcgaacaacaaaattttattctctttcatactggtatcctcttggcgttatcatcttgccgtcaataacccttgtcttgcagttgcctatgaacacggtagaaaacatatctgcctttgcgtctttgagttcctgcaggctcaatatctccatgctctcgccttctcttgctatattctttacaatgccgcagaccgtatcctctcctttataggaaagcatcagatggcaggctttctgcagatagtcgctccgcttcttgctggacgggttatacaggcagattacaaagtctgccaaagcggcagccacaattcttttttcaatctgctcccagggggtcaacagatcgctcaggctgatcatgcagcagtcatgtcccaaaggagcgcccaatacagctgcccctcccagcgcagctgtgacgccgggaataatctccagttccacctggggatactccgtcccaacctcatacatcaagcctgccatcccatagatgccggcatctccgctgcataccatagccaccttctttcctgccgccgcttcctcataagccatgcggcagcgttctacctcctgccgcataggcgtgttccgatagtccttgtccggaaattcctttttcagcaagtccgtatacacggtatacccgacgattacctggctcatttctatggcccgcacggccttcaccgtcatctgctcataggctccagggcctattccaactacatagatcttattcaaatataatcctccaatccctctgcgcaaccgctaccgtaactccgtcatccacttgcttctctaccaccagcctgccattgccgctggcatatacggcgcttctttcacacacgttatcaattccggtgatcttttctacaaacgcagaagcatgaaattccccctctgcctttagaagttctccggcgctgtaagtttccaattccagggaatggtttctgcaatacctcagaatcccctcttcccctgcttttatatcaatacttgccagtttgcaaaggctgctttgaaaaatgccttctctatttaaagtacgctcaattgccttctctatctttcccgcgtccgtcccttttctgcatccgattccaacaaccgctgcccggggcaccagatacagcgtatgcctccagctgggatttttgtggatgccgatgcatatgtccggctctttctcctggctttgtgaatccaccattcgaattccctccggaggttcaccctttatccggttctcttcacaggtacaatccacgatgatttcctcgcccgccaataatctggccgatatccgcttagccttctccatgtccgcaatccacagatgattctcctgggcaaacttatccactgcccacagatgatggatgtccgtagccgtagtgatcacaggcgttccgcctattccggcggcaagcgaaacagccaattcattggcgccgcctatgtggccggacagaaccgggataatgtagctgcctttttcgtctgccaccagcacagccggatcgctcgtcttggattccacataaggggctatcgcgcgcacggcgattccagctgcgccaacatagatcagggcgtagcactttcgaaacatccgtcctgtccattcacccagggattctgttatggagccccgcgctccattgcatttgatatctgccgttacttcatatccttcttcagataaacatccggcaatcttgtccgcaagttctttcccatttttggtaaaactgatcactgctatctgcatcctgcctgtccttcctcgttccctgattcaatccttcccgtcgcctgcttcctgctgcttccatggatgttcggctgttcggtactctgtcgtaaatgaagggtcgtaaagtttagacctttcatagttctgatgaagcaccacttctcctacgatgatcagcgcagtcttcgtaatcccatatgcttttgcagtctcctctaacgttccaaccgtacagatatgcgtctcttcctctggccaggtggccttgtatacgattgccgccggcgtatcctggcgatatcctcccgcaatcagctggtccgtcagtttcttaagcagtcctgtacttaagaataataccatagtcgcgccatgggatgcaaaggatgcgatccgttctttctccggaaccggcgtccttccctccatcctggtgatcaccacgctctgggatacttccggcaatgtatattccagattcaatgcagccgctgccgcgcagaatgaactgacgcccggacaggattcataaggtattcccagccgatccaaaatgtccatctgctcccggatcgcgccatacaggcaaggatccccggtgtgaagccggacagtcttaagcccttctgcctccgcctgcttcatcaccgctatcacttcctccagcgtcattaccgcgctgttatagattctgcacgcttcccccgcttcttttagcagtcccggattcacaagggacccggcatatatgattacgtccgcctctctaagcagccgccgaccccggacggtaatcagatcttccgcccccgggcctgctccaacaaaatgtatcataatggctctccttcttcttttacaaacagcagcgtgtaatacccggcatcttccggtatctgctctgccccataataaattctttcctgctccatcccgcagttttcaaccatcgtcacctcggccggatgatgctttaatacctcttttacttccggaagttttcctccagccttcatcagcaccttggtgcccggaagaagcagcgcctcctcgatctgataggaagccggtatgatatggatctgctgcgccttgctggcaatatccatctcaagccgcgcggcagcggcgcaaaaagaggtgactccgctcacaatctccgtctcatatcccgcttccttcacaatattgtgcagatagatgtaggtagagtaaaccgtaggatcgccaagggtcagaaatgctaccgtccttccctgatccagatactcttccagtattcgggctccatctgcatgactcttttttaacctctctttatccttcgtcataggcatatggattcccagtatcccctttttttgaattgccgggcaggcgctggacgcgatctggtatgccaccgtattttccggctcttttcccggcgccgcgatgacgtcgcatgcctccatcacctgaattgcctttaacgtaagaagtcccggatccccgggtccaactcctactccgtataattttcctgccatctgtattcctctcttgcttcaactgtctctctttattttttcccgtcttggtccatgtctgccaccgctcttttaagcaggacatccgccagattggtcttgcccaatattccgtatacattggagtatacgaccgctcccgtctccatttctcctcctgcgcggtattggaggtatctttgtatcttgcccatgacttgctccattaccaggcagcgttccccgccacttagcatggcaagggcatcgtccgtggtcagggcttccagcagcctcctggattgctcccccgaaaggcctgcccgaagagccgcagatgccagaatctccatcctgcagtctgcccatctggaatgggtattcatgatcccgcccgccaccttgatcatttttccgatatggcccgccagcacaattcccctgcatccttgttccgctgccatatccagggtctgtccaatataattgctgcatttgataacagccttttcttcgatgccgtaggcatccctcaaaaacgtaaggccataattgcccggcgcaatgaccagatacctgctccccccggccagccttacctgaatctccagccggatcgtatcaatcagcgcctgctcgctcatcggctctacccggccgcttgtccccagtatggacagtcctccattaatgccaagccttgggttaaaggtctttcgtgccagcctctctccatccggaatggatatctctacatcaattcccccgatatatcctgcttcttcgcaggcttcccacacctcctgcaggatcatcttcctcggcacctgattgatggccgggcttcctaccggctgctccagccctggctttgttactgtcccaataccctggccgccccgaagggttctttcgctccctttcgtacgctttacctggctatataccagcacgccgtcggtgatatccgggtcatccccgctatcttttttaaccgcgcaggatacgctggaaggcgccctgtcttcctgcgcggcatacgctatttttatgtcatagatctcaagggtgagcatctccccgttgggaagccctacttgtatttgatctgcctgtgccccggaaaacaacatctgcattgctgccttggttgctgcctgggcgcatgttcctgttgtatatccccatgcaagcctcttctgtgccatggccttcccctccttgtgtatcctctgcctgttatatgacgcttatcctatccttcccattccatgatctctccgcacgcaatcttttctcccgagttcccggatggctggcttctaaaatcatccggcatcccatgaataatgatcgtccttccaatcacttcttccggataaaatcttccggtatatacctccatccaggcaataccgttgtgactcattaacggcggaagatcacccgcatgcctgggatggggtaccccttcgggattgtaatggctcttagcatccgcaaattcatcctgagaacttcccgtacagctgcctccttcatgaatatggaagccgtagaagccgccgctctctctttccagttccggggggattccatagatttcacccataagaaccgtccctccgtatacttcatacagatagacatttccctggatggattcatatgcctcgctgcctttgatggttgcatgagccgatggtatttcttgaatcaccttaaacatttcatcacactccttgcaacatcatatgcatcagcccaggaaatgttcctcaatgacgcatacagatagtccgtcgtaaattctgcgtattcctttgccagattccattccggcatgcaaaatccgccttgccgcctggcagtttcgctgtcctggcagctggcagccatgtcagagagtttctggaattccggctctgaattgaattctaacaacccaattttcatcccgttcatttttcatattatctttgctaaaattgcttcgccagttccaatatcatcaatcaaatactattatagcaaattccgggacaaaaatatacagttttgatttgccggccttttcatgcgtcaaaaggcggctcacatccgccagccgcctttatactaccctttatagaatgctttcagcgcccttccgataaataccgacgctccctccccatatttttgatccgtgttctcctgcaatgttgcattttccaggtacatatcggccattttaatcagttgttgctaaaatatgacatgaatgcagacacatctttcatctgatataattgatccgctcccattctgactgccagtttttccgtcgccgcatccagcctccctttgtatgcttccatattccttgataaatatatccttctgctcatccgtcatattttttaacatatcacggtacagctgctcgatatccgccttattaaaaacctcgaaattcatcttgttctttttgctggctcttcagcagttcgttcttatcaagatcaggatttttaaggaccgccttaatctccttaaggggcatgtcgaattcccgaaagaacagtatctgctgtaagatctccaatgccttatcgtcataaagccggtatcccgcctcgctgacaagagtcggcttaaatagtccgatctcttttactgtcctcatataccgtgttcctcctgttcttgatgatcttatcatatcctatgacgcagcgtgagggtcaaccagaaaattctgcgtattttatatccattctggcaattcccatcatatgcgttataatatacagtatggcgactttgtcgtacttttcatttcacaggtggtggaacttttgattaaaatattattattggaagacgatgacacgatttcctttggcattgaagcagccttaaggcgaaaagggtatgaatgcatcacatgcccttctatagagcaagggagggaatgcttttcctccgatattcatctgatcctgctggacttaaatctccccgatggaagcgggtatgatttctgcagatgggtaaaggaacaggcagataccccgattatcttcctgaccgtgcgcgacggtgtaacggatattacaagaggacttgatatgggggcggatgactatatcatcaagccctttcatatcgccgttctggaatccaggattgccgccgttcttcgcaggcttccggaggacaagcagccggtactcgtctgcggagatatttcccttaacaaggataaaatgcagggatatcttaacggagagccggtcactctgactgcccttgaataccgccttctccatatacttctggagaacaagggccggacactgccccggaatctgattctggaacggctctgggatgcagacgggaactttgttaacgataatacgctgacggtaacgatgaggcgcctgcggaaaaagttgaatgatacgcggcatatcgtgacaatccgcggcatcggctaccggatggaggaaattgtatgaagaaacaagggatgaaagcatttctcgcttcctgcctgctctggctgcttcccggtctggcagcaggctttctttgcgccgccattttaagttcccatgattacaacttcaccgcccgcttaacgggggcaattctggaagggcaatctctcccggcggcaatgaaggacaggcttcaaacggagaacaaagagaactttaaggaaggaatgcactatctggaacagtacggtcatcaccagtgggaaacgatgccactgattctgccttacaccatcgttctttgcctgatactttttgaagcggcaggatgcgccgtattctatatgcgcagacgggattggaactatcaggaggaaaggatccgcgaactaactgcttacttgcgggctgcagacagcggaaaggccgcgctgcttccccgcagggaggatgccttctcccatctggaggatgccatatacaagacggtcgtctcccttgcctcagcaaaagaagatgcggtaaaagaccatgaaatccttgccgcaaggatagcggatattgcccaccagttaaagacccctcttacttccatgtcgctgatggcagaacttctggagccttcccgcaaggaggaggaagaatatctggagaggctgagacgccagattgagcgcctgaaaggacttgcagacggacttctcgttctggccagactggattcccacactctggaattctgccggcaggatttgggcgtggaggaactgctctatgaagctgccggccccctcaaagaaatgatggatcagagacagatccggcttaagattcaaagggaagtctgggaaggccaggagactccggcagacatccggataaacgcagacatgcaatggacctcggaggcgctcatcaatatcctgaaagactgcgtagaacatacgccggatcaaggcactatccagattgaatacggacagaacccgatctatacccagattcttatagaagatggcggcagcggcttctccaaaaaggatcttccccatctgtttgacagattctaccgcggagaacaggcggcaaaagacagcgccggtatcgggcttgctctttcccggctgatcttggaagcgcagaacggacatgtccacgccgaaaactctccggccggacatgcccgcttcattgtaagactctacaaggactgaccctgtcagatcgtctcatccttgatcgcgtcaataatattctgtctctggattctcctgtcccctacggcgtatgccccaatgatgcagacaaggacgaggcctgtataaccaagcacggccgcgtaaggcgcatagggcaggtattccgcaagacttacttcattgagatacaggaagcctgccagaacggccacctggaatggaaggctgtagagcaagggcttcaggcccagattcaatccctccaggagcagcatgcagcgcagttttagcggggagagccccaccgacttaagcatggcaaactccctgctcctctggcgaaggtttcctgatatgctggcccatacattggacagtccgatcagcgtcagcagccccgtcaggaaagcgacgaccgtcgacatgaccccattttcatgatccatcatttcctttttctgcgccaagtctgagaccatatagtccccgctgccataatagcgtcccacaatctcctcgatacttttggatacctcctggattctggaataagacacgcctgtggaactatccgtcataaagtttccatagaccgccgttgcagtgaagcgccttttttcgctgcaatttgccgcgatttctctgacatgttccattggcatgattgctgtcagcgtaaacctgggcagtcccagcctttctgtcggcagtttctctacaatctcccctgccgttaactggaactgataatcacctttatcttcatcatatgccttctccgtaaatggaatcttctgtcctatctgaatttttaacatttctctataaacttttttctttctcgtactggcatgaggatctgcagtctggttataaatcagcgctctgctcccatcttccagatatggttcgggatctatcccaagtttcaggcagtattcccgaaaactctcttcttcaagcccaatcaactgggaatagattcggtactttccatcccgcttaatcggcgtgtactttttctccgaaacgatctcatcaaagcctcctagataagtgtctatatcatccgcagcctgctctttggtcacccaggtagcgcagggcatcttgctgtaaagaacggactggctgatgccggagacttcttttatctcatccagcgccttttgctccggcactcttccatcgctgatcgtaagaaaaatatgtccttctttttcctcctgcgtctgatagatctctctggcagcgttctgggttgtaacaatatacaggaacccggtcagcagaaggtaggacatacacagtgagatcgtagccgttcggtaggatctgcggcgcgccgccaacgcattggcggccagttccccactgattccaaaccggctggaaatccggcttctgcgtatcttctttcccttcagcgtctccacctgcttaagcgcctccacaggcgttaatctagccaccttgcgcgccggtatcctggcagacagccaagccgtgacgacagacaggaggatagccgggactatggctggcagcccgaaagtcagtacaatatccggcgcgctccttccaatatcattcgcctgattaatcaggcgcatcagctccgcgtccagaagccatccgcataagatgcccagaggaagcggcaccacaagcagcaccaaggcttccgatgaaactgccgccttaatctgcttcggcgaagccccgattcccgcaagcgtgcccagctgggcaagtttttcattggcggacagggcaaatgcgttgtggatcaccagcacgaatacgccgatcaaaagcacagccaggacaagaaaaagcaggggaaccgtcagcatcttcaaactgtctatactgtgaatctgctccggcgcaagaattccatatttggacagcagccctgcattgtacctgagattatacgtctcatattcatccgtctcatatccgatggatgccgcaagtgcaggaagttccttgtaagtgcttctcatagggtcaaaacgcagatagaccgtcagactatcctccggcttgatcgattcttccttcagaaaactcatggcggtatatgcaggaaccgatgaagatgtggcaacatccattatccctacaatcttgtatgccttcgtccctgtctgtcgaaaggtttccccatcatggaagccatccgtctccatgcacacgtttccttcatagatccgctgtcccaccggcagggtaagcgtatctcccacagccgcttccgggtggtcatcaaaatactgctttgaaagagcgatctcatcttccgcagccggaatgcgcccttgggttatcaggcctttctccggcatggaatcccaatactccttattggcgcccctggatataaggtaagtcctcttccctgtatcctcaagttttgccactccccagggaccttttaacagcacggcctgtacagacgcataattctctatctgcttcaggctctcgcctttggtattatcaaacaattctccatgccagttaccatcctcattgatggaaagcgcaatcgaatccgtccacatcgtatagacaaacccgcagaagcaggacatcatggtagtcattaaaaataaggctgtcattatggcaaggcttgttcttttattcttccgtatggcatcccacacatattccctaagaatcttcatcagcccaccacctcgtcatgcagaatcttcccgtcttccagcgttatgatcctgtctgccataagcgcggtcttctcatcatgagtgatcagcagaatcgtctgcccataacggcgattagacaattttaacaattcgatagtctcttccgagttcttccggtccagattgccagtcggctcatctgccagcagaatcgccggatggtaaatcaggcttctggcaatcgcgaccctctgctgctgacctcccgagagttcgcttggaagatggcttaaacggtcggcaattccaagtgtcgagacaagatgctcgaaccgctcctcatccggcttctggttatccagcaataccggaagcagaatattcttccgcacattcagcgtggggatcaggttatagaactggtacaccagccctactttccgcctccgaaaagcggcaagctgctccggtccaaggcttgagatgtctgtatcctcaatataaatgcttccgctggtagggcggtctacccctcccagcatgtgaagcagcgttgatttgccggagccggacgccccgatgatcgaggtgaagcttccccgttccagagaaaaactgacatcattaagcgcagctacggtattcgaaccgctgccatatatttttgtaagatgactgcagcgaagtatttccatagtcgtatatctcctttcctgttcgataccaacataatagtaaggcaatgtgacaggaaagtgacaactctattcaaactttagaatgaggaatcccttcttcatgatatctgctataggctcaaacaatccaggcaattcatccgctccttttgcgaagacatgcgccgcttgactttatcaaaacctccgcaaaactccacctcgtcaggctgttcaattcctctcagcgcgtttggaaccgtcggcacagttaagatcattctttaatattgataattattccttccacaataatatctgcacaggtatctggaactacccgtaccgcctgatccgtctcatctccaatcccgctctgagattcccagaagcagacgacatagggcagaagttgtttacaaggggcatattcggaatatgccctgccgcttaaaaatggccttgaggtcaatggcctgtatttagtatagaaatcaggttccataagtttatccacaccttttcataagcctgaagtttatagcccttttacagcaagtattttttcaaatttctgctccgactgtatctcatgagtaagaaactggccattataaaacagactaaatgttgtaaatggaacaggggcattctgagcctgttcccgcgtggtaatatggactgcttgaaatttaacatttctctttttggccatatcttcaataagtggaacacattttgctgtaaaaggacattggctggtataatacagtgtaaaaccattctgcgtgccactgtgttcggtctcttttaccgaagaactaaagcagggcctatcggcgtctttatcaaagggcagatacatgagttcaaaataggggcttgcagtgtctgctgtttcaaatcctttgtatttcatatatttggggtccgaaaggaatcccatcttcttttttgacgatagtataacaagtccttttttccctttctccttactgtctctgacgcattcgtccagaagaagagtcgaatacccatgtcctttgaattgcccggatacccaaaggcagtcaatatacatatagccgtcggctgaaatcggcgcccaggcgtattcagcgggaatatactcgataaaacattttccacgtacattgcctttcaaaaaaacgagtccttcgtctatcctttctttcagccatgctttttttgaaagcacctgacagtctttattatttgcgatggcacagcagatgtgctctgtttcaagattatcgtgtgtgattcttataagttccataatattacctcctcctgcatacactataacattttaatcacgacatatgtctgtcatatttaaaatttaattaaaagaagatataattttataatggatgcgtctgtcagatcatggtgtcgtccagcaaggcatctgccaactgatgacgcagaatttttctgccgccaagataataggcgagcgccacaaagccaatgatagcaagaaggaatacaatgaccggcataaaaggagcctcttttataaaaatcatcggttcaagataacttgcttttaacatggctgcaaccagaaccactgtcagaggcagtgtcaccagcaccggacgtccggcaattaccagcgcttctatacagaacatcttcttaataccccccggcgtcaggcctacggacatatagcgcgcaaattcccgcctccgctgccggacgaaccccagcgtattagaaaacacatttccgattccaatgatggcaaacagaacgcaaaaaccgcctaagactagcatcatgccatcaaccattttatcattggcaattttatcctgaatacggttctcactttcaatttcatatgcatttcctataagcccggtaacctctttctccagatcctttagttcctccaatgtgacgccttccctggcaagaacccggatataggaatcttcctctgctccttttatggtgtctttcaactgttcccacagggacgccggaaggaaatgtaccagttcataataatctgtcgtgccatactcttcccttaaagccggaacctcctgggtataggaaatcacagggatttccgccgacatcttttcttcttctgactgctgaagtactgtcgtatttatcgtttcttccagatatggataataatcaggatcacggaaattgggattactggtatcccggatctgattcagaataaccgcgccgtccagcctgggctctgctttgatctgcctgcaatacgcaagaaagctggcatcatccaatataaccagtggagcattgaccagccaccctccatctaccgttgacacgctatccgcgtccgcattctgaaagccgcctaagccgctgaactcctcgctgacttcttcctctgttatcattcgttttgcttctgctttctgatatacggttaagtttcggacaccggaaatttcctgaagcttctccgtctcatgaaatgcctctattccagtatcctttaccgtcaccatcacatcccagacatcctggtatctttcaaaatatgtcattcttgtactgatgcccgaaagggtaaagaaacattgcatcaaggtaaacgccagaaaagaaaacgtcagggataatgtagcggtacgccaggcctttttctgcgccttcagcgaatttccggccagttctccttccagcccgaagaaaaaagccagaacgcgggaattttttcttttcttcaactggatttcttcagtattcctgatggcttcaagaggcgtcagacggcttaatttcctggccggataccaggctgatatccatactgttaatatggtgatcgcgaaagtaaacacgaataccaacggatgatatcccccgaccgcctcatgccgtcctgatatatcgcttccagctataatattcgtcatttccattactcccagccctatcagaacgcccagaacatttccaagcagaagggggactgcgcacagcgccgcggcttcctgcaaaaggcaggccctgatctgcctcggcgtggctccgatgctggaaaaaatgccgaactgatgtattctggcattcatagaaaccgcaaaggagttatgaatgatcatgatcagggaaaagcaggccagccctgtaattgccagaaaaaaaggaaaaaccagccgtggggccggatccttcggatcccgtatcagatacatggacagcagggaatgatgacaggtaatggcctcctgatctattccagttaattcggcgatctggggcagatcttcgagaatccttctcatatcattgaaataaagatctgctacaatattctggccatctgataattccttgtttattatgaccttatctatgttggggtatttttctaccacgtccagaacgctgttatccagttctccctcaatccttgcctgccagctgccctcttctatttcaatcctctcaatgtcatacttccagaagttataaaacaaggtgcacagaagcgacagaaacaaggctgagatgaaggctgccaccatgacagagatgctggatgcccggttattctttatatagctccacgaataatccttccacatagcagatcacctccgtttccggtcactgatgatgcggccgtcctcaatcgtgactatgcggtccgcctccagcgcgactttttcatcatgtgtgatcagcagaatggtctgatgaagatttctgttggataatttcagcaaatccacgatttccttcgagttcttccggtccaggttgccggtgggctcgtctgccagaagaatggccggacggtaaataagcgctctcgcgatagccgttctctgctgctgccctccggacatctgattcggcagggcatccaatttgtcatgaagtcccagtgatgtcactacctgttcaaagtattcctgattcaccttccttttgtccagcagaagcggcattaaaatattctttttaacggtgagcgtaggaatcaggttataaaactgatagaccagccctacctttctgcggcggaaaatagctgcctgggtggcattcatagacgatacatctgttccatccaccaggatctttccttctgttggctgatctacacttccaagtatatggagcagggtggatttcccggatcctgaagccccgacgatagcaataaattctcctttttctacggtcagatcaataccgtccagcgcaactgtctgattactgcctgtgccatatagttttctgaccccaatacattttaagacatccaatcttatctctcctctctaataatccacgttatttcatgcagtcttattatagcaaagataaatgacatctcagtgactgtagagcctgatttcaaaacaggcgccccctgacggcagattgcgggcctcaaggcttccaccctgcatttcaaataaggactgggaaagtgccagccctattccgcttccgtcttttgcggcgctctgcccccggtaaaatctctcaaaaagatggggaatatcttccggggcaaagcccgctccctcatcccagatccgtatatccgtatacaggggattctggaagtattcgcagtgaatggttcctccccggggggaatgttccatggcgttttttatcagattcatcaaagcctccatcgtccactccatatcccccataaattcagcacagccattatacggaatatcatccaggatatttttttcggacatgagcccttccagattatcaacagccagattcagcactgtatagacatccacaggggaatgctccagcttaagcgcccctgaatcgatcttcgagagtgtcagcagcgactcttccagcctgttcaggcgtgccagctgattccgaatcggctttgtatacttttgaggcgcttctttctccataagctgcaaggagaggaaggcggcggtaatcggcgtcttaagctggtgggcgatattggccagattttccgcaaaacgctcttttgcttttatggccgtttcctttgtcacgtaaaggcttgtaaccgttttatagatctcatcctgcagatgggaaaattcatcttccctggtctgcacaatggtcccggccgtgccggtattgacctgttccaggtatctcgtcaagccggatatccttgtgtggctgcgccttttatctgaccatgatgacgcaagaaacgctgtagatatcagaaccgcgaccataatcgtcaaaagagatgatctctcaccggtcttgccggagaagtcaccctttgtatacccgtattgtttcaaaaattcatttccttctggccgcgattccgtctgggtctggtactctttcagggcggaaagcagcatttcctctccttccgggtcgttctccagaatgatctgggacagagatgatatgccgctgaaagtagcctgctcatgccagcgctgccacatgctgttcagaaacaggactcctgccagacaaatcaccactggaagccagaccgtcaacatctgcttctttcgttctatcatagcgaatcctccatgcggtatccaaagctcctgatggttttcaggcatgcggggtgacgcagtttctcccgcagccgctttatggtaacggtcaaagtattatcgttcacataacttccattgctgtcccatacctgctcaagaagctgccttcgcgttaccgttttccctttgttttccatcaatagcagaaggatctggtattccggctgacttaaggcgatctccgcattgtcgcggaaaacagcctttttctcagtatcaagaatcagggagtcgcaataaaagcaggcatcctttctctgcccggcacgccgcagcaaagcaaggatacgcgaatgcaggacttccagttcaaaaggcttgacaacataatcatcagcgccattttgaaatccatcgactatatcgcaggaatccccgcggacagtcaggaagatcacaggcagctggagccatcttaaccgcagccagcggcacaagtcatttccctggccatccggcatgttccagtctagcaggattatatccggctgcctctttcgaagcgcctgcttcatatcctcaatcatatggaaaacagttacctggcattctgcctgttccagatattcttttaccagctgcgcaatcgtctcatcgtcctcagcataatacagatcaatcattttcccattctctctttctatacctttttccgtctttgcagatatctcttctggtatttcaggcctgcatactctgttatacgcttcatatatacggcatcactgacaccgccagccacaccggcgatcggaacgcccgcaggaatttcatatagagaagtcctgtagacagcgaacctgccacttcctgaatctgctccttctatgaccagctttttctcaaaaagtgtcatttatacctcctaactctacaaattcacactatgacttattatcaagatattatatcccaatcctctgccttgggcaagtgccagtctcgggcaatccgcagtcttaatacacaaaataaaccgtaacttgtatctcctttacaagttacggtttcccaataaaatccttactattaaatttccccgatcagcatcgcgtccccgaaactaaagaaccgataccgctctttcaccgcctcttcataggcagccagaacatgctccctgcccgccagcgcggacaccagcatgatcagtgtggactccggcagatggaagttggtgatcaggcagtccaggatcttgaactggtagcccggatatatgaatatctccgtccatccgctgcaggctttcaaatgcccggtctcatccgccgcggactctatggtccggcagctggtggttcccacgcagatgacccttttcccggaatctttggcacggttgatcttcatcgctgcctcttcgtcgatctggaagaactcggaatgcatgtgatgctccgtgatctcatccacctttaccggacggaacgtgccaagtcctacatgcagcgtaattcttgcaatgtctatgccttttcgctcaatctcttcgagcagttccggcgtaaaatgcaggccggccgtaggcgcggccgcggagccggtgtgggtcgcatagaccgtctgatagcggttcttatcctccagctgatgggtaatgtatggcggaagcggcatctggcccagcttatccagaatctcttcaaagattccctcataagtaaactggatcaggcggtttccctcgtccacgatatccacgacctcgccaaccagaagcccttccccaaaactaatcttcgttcctatcttagccttctttccgggcttaacgagcgtctcccatatattattttctttacgtttcaacagtaatatctctatcttggcctctgtcccgacttttgagccgatcagccttgccggaattaccttcgtgtcattaatcaccaggcagtctccctcatgcagatagtctgtaatctctttaaatacatgatgggaaacagccccagattccttgtcaagtacaagaagcctggagctggaacgatcttcaagcggatcctgggcgatcaattcttccggcaattcataataaaaatcctgacgtttcataatatgaatcccttcttttcttatttatcttcaggcagatcatccttgaatttatcctgcgctggctttgatccgcctgtcggcggcgtctgccccggcactggtccatatccctgaggccccggatatccttggggcatctgatatacagggaataccttgatcttcttagcatagatgacccgggtatcgcacagcatatcatggatgccccgcttctccctgtcaaatcctacgataatatagccgattccaatggaaaggctgcaaaggaaccttcccacagtctcccggtacacgacatccagaaggctcagcctctgcccctcatccacgctcactacccgcaggttcatggctcttttcccaagcgttgttcccgtaagataggtgcacagaataaagtacaggacgtggaatacatacagcaggatatcttttaacgtatactggaacagcacatttcctccaagggccgtgccttccagtgccgcagtgattccggatatgaacagccttacaaacagcagccccgcaaacacgatcacgctgtcgatacaataagcggccagacgtgcccagaagcccgcataggatacttcgggcctattgcaattgttctgcataatacatcggcaccccgctttccatgtctgctgcggtttctttcagtatctgggcttctgacttcggtatcaggtcttttacctgggcaaataaggaggcaaaaacgccggatggctcttccagctcgtagtaattattgactcccaattcttcactcatagctgcctgcatatcttcaaatgaactgatggaatcaatcaatccattgtcaatcgcctgttcagcggtataagtgcggccgtctgccagccctctcaccgcctcttcggacatgcccctgccttctgcgacaatactgacaaatttattatagtactcatcgacctgctcctgatagattgccatctgctcatccgtcatctgggaactgtctttatactcgccactggttatgctgaagtatcggattcccagtttctcatagagcccggtcatatcaaacccggacatgatcacgccgatggagcctgtaacggtattggaatttgcatagatcttgtcgcttgccatagataccatgtatcctccggacgctgcatagtgtgccatataatcccagaccgggcgtcctgtggcttctttgtaatctttcaacttcagatacagttcctcgctctcgtagacggttcctcccggggaatccacatacagaaggatgcccttattattggagtcttccatcaggtcatcaatgtactccatcgtcgtctggtgctgatagccttccggtatgtcgaatatgccggtactggcctgctcctgaatggttccttctactcttacgatcgcaatataatcactcagcggcgcgttgaatcggtaatctcctgtgagtatctgccctacgctgtcatttagcatcttctgggaaaatgtattcgtcagcacgctggatactcctacggcaataaacaaaactgctgcaatcaccaggccgattatctgttttttcttcatattttatccctcatcttctatttgcgaagttcgattcccatgccttccagctctttcaggattctttccattgcctcagttacttctgcgtcttccagagtcttatcctttgcgcggaatacgatggaatatgccacggacttatatccttctttaatctgcgcgccttcataaagatcgaacagcgcataactttccaagtaggctccgccctttttctcaatcacttcttctacctggccggccaggatctctttcggcattaccatgctgatgtcacggtttactgccgggaacttggcaattccggtatatttcctgtcaaatgtggctctctttacgatctcaggcatatcgatcactgcaatatacgccttggttccgattccataagtatcggctacatccggatgtacttctccgagatatcccacgactgttccgtcatagatgacatttgcctggcgtcccggatgcagatatggcttgcccgcctgtggatcataagtctcttttccatgcattcccactttgtcaaagaattcctcaatcacgcctttcatgctgaagaagtcgccatctccgtacatgcccagcgtaaactgcattctttcttctggaagttctgtaagcggcagcgcctttggaaggtatacatttcccagttcgtacagccttacatccttgtttcttctattataattggtagccagcgacatcagcattccattcagggatgtggtacgcatgatgctgtaatcctctccaagaggattgatgatctctacggtctggcgaagcagcgaatcctccggtatcatcagtttatcgaacactttcggactctcgaaagaataggtcataccctggctgaatccgcagaattccgcgatatcgcgggctacctcttctactctgagcttaaaggagagttttcctgtcgtagcctccccccttggaagggtagtaggaatgttgtcataaccatagaatctggcaacctcttccgccaggtcagccacacggaacagatcatggcggaaggttggcgcgatcacttcattgcttccctcatcataagccaggccaatcttctcaaagtatccgatcatttcttctttggagatatccgtgccaagaagattgttgatcgcgtccgcgtcaaacagaactcttaccggctccttcttcttgccgtaaacatctaccattcccccgacaacttcaccggctcccagttcttctaccagctggcaggcgcggtcgattgccgcctgggcgttattgggatccagccctttctcaaacttgccggaagcatccgtacgaagtcccacctttttgctggacttacggatattggttccgtcaaagcaggctgcctcgaaaagcattgtcttaacatcgtctgtgatcatggagttctctccgcccatgattcctgcaataccgatggacttcttgccatcgctgatcatcagcacggtgtcatccatctccctttcctgtccgtctagagtcgtaaatttctcgcctttggctgccgtgcggacaataatctcgcggtcagcgatcgtatccagatcataggcatgcatcggctgtccgtattcttccatcacatagttggtaatatccaccagattgttgattggacggatgcctacggatgcaaggcgtctctgcatccatttcggagatggcccgattttgatattctttacgactcttgcacagtatctcggacacaactcgctgtcctttacagacaccttgatatagtcgttcacatcctcattattgccggttgccgtaactaccggaggatggaattcctttccaaacgtagcggctgcttcccttgcaattccgatgacgctgaagcagtccactctgttggatgtgacttcatattcaaatactacgtcattaagccccagtgcttcgatcgcgctgcttccgacttctacatcatccttgaagatatagattccctcttccggcgcttccgggtacatatcccggtcagagcccagttcttcaatcgagcacatcatgccgcagctttctatgcctcttaactttccttttttgatcttaattccgcccgccacgcggcttccaggctcatgtccgcctgccacgcgtcctccgtccaataccaccggcactttgtcgccttcatgcacgttgttggcgccagtcacgatctgtacggactcgcttcctatattcacctggcagattatcagtttatctgcatccgggtgcttttctatcttgtcaatctggcccaccacgatcttagaaagatccgcgtccagttcttcatatccttctacctttgttccggataaggtcattgcatccgtatattcccgggccgtcacatccaggtccggaacatacgcttttatccatgataatgatgtattcatcttacttctccctccaattagaattgcttcaagaatctgatatcgttttcgtatagcaatcgcatatcgtcgatctcatattttagaagggcaatacgctccaatcctacgccgaaagcgaagccggtatactcttccggatcaatgccgcacatttccaatacatgcggatgcaccatgccgcatccgagaatctcgatccatccggagcctttacagaagcggcagccttttccgccgcatttgaaacaggttacgtccacttcggcgcttggctcagtgaacgggaaatgatgcggacggaacttggtcttggtctcagggccgaataattcttttgcgaatacttccagcgttccctttaagtccgcaaaggaaatattcttgtcaatgaccagtccttcaatctggtggaaggacggggagtgggtcgcgtccacttcgtcagaacggaatacgcgtcccggggcaatcatacggatcggaagctttccctgctccatgacacgtgcctgtaccggcgatgtctgggtacgcagcacgatatctttattaatatagaaggtatcctgctcgtcctttgccggatgcccgtcaggaatattcagtttctcaaagttgtacagatcatactccacttccgggccttccactacttcataccccatgccaacgaagattctctctacttcttccagcgcaatcgtattcggatggcggtgccccaccatattcttcttcgccggaagcgtcacgtcgatgacttcctgcttcatcttttcttcgcggatagcccgctccatctttttcttgctctcttccaagaccttctcgatagacgctcttgtctcattcacaagctggccaaccttaggccgctcttgcggggcaacatccttcatgcttttgaggaccgcggtaagttctcccttctttccaaggaacttcacgcgtacatcgttcagtttttcaggcgcatcagctgcttcaatggccttaagagcctcatccttgatgctttgtaatttctctttcatcatttttctccctttcttatatattctcttctctagaacaactctcatcctatggcggtgggagccttatctcatttctagataaaaaaaacctcatcccaaaagggacgaggcataacccgtggtaccaccctgcttcctgcgtgctatcctcacacaggcactctccgcatgcgtaacgtgcacctacggcatttcctactgatctttcaaaaatgcagctcgcgcgggaaattcgattgccatccgaaccaaaggaaactttcagccgggggtctcctctctctaatgggaaatgggtctctacttacgcggtcattgctttttatctatgaatacttaattattgtatcataacaattggggatgtcaagaaataaattacaacttttccctgccttccccggtaaacaccttatcatacatcatcatattcagttccccgccaagcaatatgcagtacatgcagaaatacatccacagcatgatgagcacgatagtggtaaggcttccatacatatcggaaaaccctttgaatatatctacgtatacagaaaatatccaggatacgatcatccatccaatggccgcaaataccgcccctggcagctgcttgcgcagcttgtccttcctgtttggcaggaatttataaatcaggaggcagaagaccatcaatacaatgggggtgatgatggtacgcatagcaatcagtctgtccgccagattcttaagaataggtacatgcgccgcaatgaatatattcagcgtattgccaaatacggatagtaccagcagaaatatgattacaagtatgaacatcaccgtatagatggttgcccggattctcaagaatatataattacgtgtctcattacatttatacacgcagttcagcccggaggtcatcgcaagaacgccttttccggcggaccacaatgccactaccactgtaatcggaatgattccggaagattggttgtacacctggttcacaatcgaagtaatcatagaatccacggatgtaggaaacacctgaatcacggcggtcatgacatccgccttggttaccggggtatactgcaccatggtaatcaaaagcagaatgatcggaatcatgcacagcataaagaagtatgcggactgtgccgcatacgcccctacgtgatcttccgtaacatcagcagtcatatttaggatcttctgatatatttcttttaatcttttcattgtactctcccatatacttgccctatattctacctgatttttcatggtttgtctatggaaagtaacttagagcctgtatttaggctatatcattctacggtaatgcccgggaagaaaagggtaagtatatctatgtaagtcttgcctttcctggccatctcattggcgccattctggctcatgcctataccatgcccatatccgccgccttttataacaaatgtatccccctctttccctatggtaaagaatgcgcttggcagaagcgcggaactcgccacagtgtttccatcctgcttctgaatctcatatccgctgcctcctaatgccctgcggatcttattctccgtgtccaccgttacgctacccttatctcctgtggcgcatatctgaagcgcaacgcctcccggccctgtcctggtcacctctacgttttgcagcatgcctacatcggttgccgtattaaggcctaccaggttggagagagtctgtacctgaattctggcctcccaccggtaccatggcagttctctttcatagtccccctcttcgtcctttacctcaacggtctgaagatactggttctgctcattcggttccgtcccccaggcttccaggcttgtcgtttttccacaggaagtggaataatagtatgtagtcacaatctgaccgttgaatcttgccacctgcccctgcgtctcattcacagcctggcttgacgcctcctgagcctgggaattgccatatacctggtaatccgtgctgtcgtttacgtgcgcttcgtattccgggtacccatactctgccatctgctgataggcatagcttctggcgcagactgcctgcgctttcagcgcttccagttcataggatgccggcatctcgctgggcacgaccttgcacaggtacgtttcaaccggaagttcattgatgatgacaataccttccgccgtagtccgaagttccagcgtcccggcataggaaggcacgccgtatcctctctgaatgctatccagcgtaacctctcccccatctttcgcctgaatgcgaatattgcccttggcaaaccgctcgtcatccggcgcaaatgccgccttctggcctggctcgatctcctgctgctcctccccgaaagacagaaccaagcctgctgccgatgacacttccacgcccggatgcactattcctgcatgtccggtagtcataataagcacgcgaatgttgggattatccgtcaattgcggttcttgtccctcttctgcatgccgcccggatgtatccggctgctttttcaccttttcttcttcccgcaaggtcaaggaagagagcaggccgctgataatcagcaggctggctgctatagccagtccatagtataagtttcttccctttgtccatttgttcacgctgcatagcagcctgttccatctatacttattccgtctgctcttattccaattatatcggttccgtctatttcggctccacttgtcttgattcaatctatctgtgccctcttgtccatgtcttcttctaaatgtatgcttagcagttgtggattatgcaccgtctctgcctcccgaatgtccgtcatttttccttgataaacttcccggcatcagaagaaaataccagcgccagcttttccaatgcatagcaacaaaaagacagccgcaaaacgactgtcctttatcttttgtatttccccaaaatgccggtttctgtattttgactcctagccacagctaggtgggtgtccgcatctgtttttctgtcttcccctgcgatatcggaggcctgacatattacagagatataagagtcccgtttaaagttttgtaggttcaaaattacagaagttgtcgtacatcccaggtttctactggaattattataacccatttccatggattttacaagtcattctgataagcagaatgttccagttcaattagtttaattcatcaacaaccttctggatagctgcaagcgcatcatcaggaagtttgtcatagccttcttttgccgtctccaatgccttgatctcattgacacggtcattcatgcgggctttcaactgcgtaacatattcaggatcattcatgtccggaatgaatccttcccaatccagtatctcgatatctgaaaatggtccccacttatggaaatctgcttttttctctacaattgtttcgagaattcctagcgtatcctttggctgtacctttttgcccatgaagtctcctgtattaacgatatagcagtctacattcttctcttctacaagttttttgaacttttcataatcgtttgccagaggataggttctgaatgggttcgcatatggcacaacgaccagcttgttaggatctacgccaggagcaagtctctctgcggaggatctcttcgttgcaagggtcgctcccattacggatgccagagaagcgcctttgagttttactaccggtggaatggtcgggtctttcataatccagaagatggcgttaaccggagcatcaatcttatccacgcggtttggagaccacaatttggacttgatcgcccgtccgttgccatttctgatatcttccgttaccagctggatctttccatcctcatccaatgtagcagagcagttctgagcggtcagaagatatttattgtcctcgcatcctgtcggatagtctgctgtcttatcaaaataggtaggctcgatcgcgatagatgcgcatgtatccgtattgataatgaaagcatcgtcgtgaagtaccttaatctcatattttccgccatgctttgcatgtgtaagcgttgattttccggatcctgacagtccgtatacggatgcaacataactacttccgtccggaagtaagtattctttctgtccgccatggcaggaagcatatccgttacggtttgcaattgcccaaaccatggtaagggttcctttcttatgctctccgaagtatctcatgccaaggatacatgcgcagttagtctccgtgttgaagtagcacagagtcttctttgcaggatcgcttaagcagtcgaagctgacgccaggcgcttcctttggtatccactgaggatcagagaagatatagatgtcaggctctttgccatcgccgaccggctttgactccttatacatctttacatattcatctgacatatactggaagttcagcatccagttatacatgatgttctcttcgccttctggaatcaggaggtgcgcttttaccatgaattccggatccagtcccgcatatacggttgcatgatacatcttcttaaagcgggatgtatagattgcatccatagcaactttatccagcgcgtcacagtctactcccggctcgcctgcgatacggcgggcggtagcgtaacggcccgtaattgctccgtcattgaataaaagaacctttgcatcagcatcaaggccaaattcttctcctctatatacaggcatgtctgtaactacggttcctggtgaattctttgccagattatatgcctcttttaatgtgttaaccggtacaacattatttccataaaatgctgcttcgataatagatcttgtctttgagaatcccggcttgccttttcctatttcttcaattggataatacgcttttgttgccatatcttcttttcctccttaaaattcgaaatttgattcattatctcattttttcgcgcaaaagtcaagactttaacaatgttttaacgaaagtttatactttttagaattcatttaccaaatatccgcgctgaataattgtataaaaaaattgaaaaaatgcaggatctcgcaaataatcctgcattttttcatcaaatgccaaaatattttttattacactttcgtatcgcggcggcaaatccgaagagggccaggattacgactgtgatcattactataaagacctttggaatcctttctacatatatattatacaaatctaccgctccataaaccgtaactatgattcccaaaaggagcagcggcagcgaggcttccctgctatatccttcaagatccttgcattttcctacatccacgcctttcggcagaagtatcgtccggttgataatttttttatatttcagcatgaaaaatccatacagacaataaatcccacaggcaagccctatgaatccaaatattccttcaaacatctaatgcactccttttactatatcttcagtatgcctttcaccgtatccttcatcatgtccacatcacattccaacgtatgaagcacctttgcatccagtatctcctgaattgcctgcggcatatctacacgggaaatttcctgaagttctttgagcaggctgaattcatcggctccctcgtatttatcatctatggctgtcatcacgctttttacgaacttatacgggctggcagtggaggcgatcacgcacttcttatcatccttgctttcttccctgtaactgcggcatacataggatgccacagacgtatgagtatccatgacatagcccgtctcctcatagaccgccttgatgttcgcggctgtctctttttcatccgcgtatcctgctgcaaaatccgcaagacgttccttcatatcctctgtgatcgtataatttccatctgctttcagttcttccatcaatgccttcgtcttttccgaatcctggccagccaccagatatatcaatcgctccagattactggagatcaggatgtccatggatggagatgtggtcagcacgaattcccgattcttatcataggttccggactcaaagaaatcaaagagcaccttattttcattggaggcacagatcagcttctctatcggaatccccatattctttgcataatatgctgccagaatatttccaaaattaccggtaggcactaccacattgatcttctcgccgtcctgtacctcatcgttggcaagaagtttggcataggcatagacataatagacgatctggggaaccagccgtccgatattgatggaattagcggaggagaactgatatcccttgccggccaattcctttgccagttccacgtcctcaaacatggccttgacgccactctgcgcattgtcaaaattaccgtgaatcgcgactacatctacattctttcctttttgagtgaccatctgcagttcctgcactttgctgacgccgttctttggatagaatacgataatccttgtcccttccacatccgcaaacccagccatcgctgcctttccggtatctcctgaggttgccgcgagaattacgatctccttgtcagcctgattcttcctagccgatgtggtcataagatgcggcagaatagacagggccatatccttaaaggcgatggtcgccccatggaacagttccagatagtatgtatccttaatctttactaagggcgcaatctcttccgtatcaaacttgctgtcatacgccttattgatacagtctttcaactcttcttctgtaaagtccgtcaggaataacttcatgacctcataggcggtctgctgataggtcatatctttaagttcatccaaagaaatatccagttttggtatttcctccggcacgaacagtcctccgtccggcgcaagtcccttaagaattgcttcagaagccgtcacttttctatctgaatttctagtacttttgtaatgtagattcatctcttttcacccttctattatactttaatttgctttcctgaacagaataaaaagtacagcgctgatcgccatcaatatcggatagaacagatatggcatgatattaaacggcgtcagcccagtaagactggctgccgacaacagctgagcgccatatgggatcagtccctgccccacggaagtaaaaatatccagcaaagacgcagaccttcttggagatatctcaaactcatcgctgatttcctttgcgataggtcctgccattacgatggcaaccgtattattagccgtacacatatcaaccagaagcgacaatcccgcaatgccgacctcgccgccgcgctgccctttgatactcttcttgatcagattcaatataaactgtattcccccaaattccttaaccagcgacacaatacatgccaccacgatcgagattacggtgatatcatacatccccgttactccctcgcccacagaagagaacatctccccgaccgccaggctgcccgttgcgactcccacgatcaaggatatcaccgttcctccgatgaggaccacgaatacattgattccaatcagcgcgccaaccagtaccagtatatatggcagcacccggaatatattgtatgtcagttcttctgtcagtttaaaattcgcattcctggtaatcaccaggaatattatgattgtgataatagcagccggaagcacgataaagaagttctccttgaacttatccttcatctcgcatccctgcgtctttaccgcggcaatcgtcgtatccgatatcatggacaggttatcgccgaacattgccccgcatacaaccgctccgatacagatagccagggagaaccctgtcttctcgctgatgcctactgctattggggccaatgccgcgatcgtccccatgcttgtccccattgatacggagatgaagcagccaatcacgaacaatcccactaccgccacttttgccggaagtatggaaaggcccagattaactgtactttccacgccccctgcagccgtgaccgcgccggaaaatgctccggcgctaaggaagatcaggctcatggtaataatgttctcatctcccacacctcttgatataatgctgatcttttcttgaaaacttaagcctctgttctggataaaggccaccagaagcgcaatcaaaaaggctacgattgcaggcattgcataaaaatcccccgtgataattcctgacccaaggaatattacaagaaatactcctataggcaggagtgctgctccatttcctctctcatttcccatacctatgtactctcctatccttttttcttactgttagtgtaattcaccagaccgccggccgcaatcagattctgcatgaattccggaaatggctgtcctttatactgcgcgtcctttgtcttgttatagatgattccgctgtcaaaatccacttccacttcgtcgccggcttcaatcccttctgccgcctccggacactcgatgatcggcaggcctatattaatggcattcctgaaaaagatgcgcgcgaatgtctcagcgatcacacaactaacccctgcctctctcaggcagagaggcgcatgttctctggatgagccgcagccaaagttctttctcgccacgatcatgtctccctgctgtaccttcccggcaaactccggatcaatatcaaccatagcatgggtagcaagttcttttccgtcaaaagaattcagatacctggctggaataattacgtcagtgtctacattgtctccatatttaaatacttttcctgatgctttcattatctgtcacctactttctctggattcgcaatacatcccgcgatcgcgctggccgctgccacttccggggatgcaagatagatcagggaatctacgtgccccattcttccgacaaagttcctgtttgttgtagagacgcacttctctcctgctgccaggacgcccatatggcctcccatgcaaggtccgcagcttggcgtattgaacgcgcatcctgcatcaataaagatgtctaccagcccttctttgatacactgcttatagatcttctgtgtcgcaggaatgaccatgacacgaacatctggatgtaccttccgccctttaagcacggccgccgctcttctcatatcctccattcttccgttggtacaagagccgatgactacctgatcaatcttaattggctccattgcctctatttcatcgatcgtctttgcatttcccggaagatgcgggaatgctaccgtagggcggaccttcgccagatctacttccactaccgcgtcatagtcggcatctgcatctgcctcgtagatcttgtattctttatcggaatgttccttcatatattcctcggccttttcatcgatcagaaagattccattctttgcacctgcctcaatcgccatatttgccatggtaaatcgatcatccatggttagacttgcaatgccgtctcctacaaattccattgatttgtacagtgcgccgtccacgccgatccttcctataatatggatgatgatatccttgccgcttacatatggccccggcttacctgtaagcacgaacttgatcgcgcttggcaccttgaaccacagttccccggtagccattcctgtcgcgatatccgtcgtccctactccggtagaaaatgcccccaatgctccatatgtacaagtgtgggaatctgcgcctataatgcattctcctgccactgtaattcctttttccggcaggatcgcatgctcgattcccatctgtcccacttcataataatgcgtcagaccctgttctttcgcgaactcgcggatggatttggagttctcggcggatttgatgtccttgttcggcgtaaaatgatctggtaccagaatcaccttatccttgtcgaacactttatctgccatctgcctgaatacaggaaccgccataggccctgtaatatcgtttgccataaccacatccaacttcgcctcgatcaactgtccggcttcaacgctgtcaagtcccgcatgggctgcaagaatcttctgtgtcattgtcattcccataactactatgcctccttatttcactaagtcttacaggatattctaacacagataaatatggcggcgcaagaaagaatcagcaagaggataagaacgcttaggttttccttatctcctgtcttgacggatggggtttttacgattgaggcttctgtcattttcggctgttctttcggttctatttccggctcctttttgggaacttcaggcttttcctcttctggcttgtcaacgaccacgatttccttgtctttcttctcctccgtgttatccgagcgcactaccacttcattctcgatttctttccctatcagcgcttcatccgtgatggctacctggtattctacaatatatctttctttggattctatcccttgcaggaattctccagcgtgtatggtataggaattacctgaaacagcaatgactgcgtcagatatgacgctgtgattctcatcaagcagcgtaatagaatgcttctggagcttgactccttccgtcagaatggtatcggttatgactacgtttttggccaccgcatccttcacctgctgggtgacatctatcgaatacgtgataatatctcccaccttatacttcttctcccccttgtctgctttcttatctaccacgatttccggacgtggaatccatcttacgttcatctgcaccgtccctgcctccacggttgccagatggcctgtacctacatcctggcttccgctgcctgtctttaccaccagagtacgccacgcctggtcaagggttccttttacctgaccgcttgaccaagtctttccattgtcatatgttacatctgctgcaagatagaaccgctcgcctccatggacggccgcacgaatggtttccctgacattcctggactcatttaccagggtcattccttcgggcagggaaaagaccagcgaattcgtcccatctccattgcagatgacagatgatgtcctctgccagccttcttctttgctgaaatacgccgtcagttccgtatccgacagagagatgtccgtactgggaatctgcggccatcccctgatcgcatccgtaaattgaatgactgcgttacggatatcctcgttcagtccgataaatcctgcgctttgcggattacatccgtcgtaaatgtaggacagtatgcaatgggacaggcaatatgcccgttccggctgatgccagcctccattcagcgatggcttcatataagcctcgtaacccggtcccccatagacataatacatagccttccccagcaattgcgtcgggtctatctcttcagacgggtaattcccattccccggcgatgccatatccggctcgaggcaatatgccaaattgccgttaacgtagtagtaatgggtcgagtatcccatatattggactgcttccccttgcacaagctttgcctcgctcgcgtataccgtcatcttgctgctctttcctgcgattataagtatcaggcacgacaataaggccccaaaaagcaggactttgctacttcttcctttcataattaactcctttcacgtacgaaaaataaacaaaaagttacaaactttccgcccctcctttccttattgttctttgctcgttttggaatacgggaatgactcttccctacggggataccccattgaatagaaatcttagacgagtgcaattatcatatacatatttgcgtcatttgtcaatacgaaaaaagaaaccggttatttccggtctcttttcagtcgatgtttcatcgcatccagtagttccctgtgattcctggattccatctttgggaacgccttcatcagacggacggagaccttggtgctgcggcctgccagttctgtatactttttcttcaattcttctatgcgggccttctgctcttcggtggctgcttcaatcctttcccgaagttcagacgcagcctccagcttctccttaaattcgctggacgctgcagccagcatctttttcttttcctcctggaactccagcgtatccacaacgctttcgtatatattctcccctaccttgtcggatacttcccgaagttcggcagcaatcttttccattgcatcaagccgcttgttcagtttcaatatgccggatgcagttacatacagatccacaaacagcacgaccgcaagtattatcgcgatcacaatccccagggttacgggaataaaagaaagcgccttgtatatcagcggatggatcactttgacaatcgccacgcaagccacaccccagatcagtgaaaacaaaaggcagacgtagcctccgatattcaacggctggttggaatagtcccaccatttatgatgaaatatcttatccatgagatatccggtcagccattcaataaacgttaccaatatggttgacgcagcatacagcaggatcaggctttcctccaaaggggtaagaaatgatacgactacgctgacccccactccatatatgggacagatcggaccattaagaaatcctctatttacgaacttcccttgcttgaaggccgcaaacgccacctctgtgcaccatccaaaaaacccatatgtaaaaaagtatagaatgaaatagtatatttccataagtaagactccatcttcattattttctaaattacagtatacttcacattgccatcagcgtcaaatagtgatattatgtaaaaggataatagagaataattatcaataacattacgaaggagcacatgctatgacgctgaaacaagggaaaaacaaccacacttaccgagtccggtctatcgacatagaaatgcagttggagcggcgcctggaggctctggggctgacggaaggatccctgattaccatattgaataatgataaaaaaggatcccttaccgcaaaattccggggcacccgcttcgctttcggcagacggatcgctgatcatattgaagtgatggaggtgcaggcataatgggtaatatcattaatgtagggttcatcggcaatcccaactgcggcaagactactctctttaatgcatttacaggagccaacttaaaggttgccaactggcccggcgtcacagtcgaaaaaaaggaaggcaaggccatgtataaaaaccaggagttcaagctcatcgatctcccaggcatctacagcctgacctcctatacaatggaagagaccgtttcccgcgaatgcatcatgagcgatgaggtggacgtcatcgtggatgtcatcgatgcctcctcactggagcgcaacctctatctgaccctgcagttaatcgaactgggcaagccagtcgttctggcccttaatatgatggatattgtggaagaacgtggaatggagatcgaccttcaccgtctccccgagatgcttggggttcctgccattccagtctctgcccgcaagaagaccggactgtccatactcatgcacgcagtcgcacaccataaggaatatgcaaagcaagggcccttcatccatcatcatgatggccgtcattctacccataagcataaccatcatgacgagtatgccatggtctatgaagactacatagaagacaagattgatattatcatgaatgaacttgaggaaaactatcctgacatccagaatgcccgctggcatgccatcaagcttctggaaaaggacaagaatgttgcggcccgccatccattagatcttggagatgtcattgaccgcagttatgaaaaggacattatcaatcaaaaatatgattttatagaagaaattatcagcgaggttctggtaaataaatcccaaaaagaagcatccaccgacaagattgatcattatctgacccaccgatggctggggtttcccatcttccttggcatcatggcgctggtattctttcttacatttaccattggagactggctaaaaggctttttcgagattgggcttgaccaaatctcttccatggcctccagcggccttgaagcgcttcatgtcaatgccatgctgcagtctcttattatagatggaattatttcgggcgtaggcgggatcctgacatttcttcccaatatatttatcctcttcctcgcacttgcaattctggaagacagtggatatatggccagggttgcatttgtcatggatgatatcatgagcaggctggggctgtccggccgtgcttttcttccgctgcttcttggatttggctgtactgtgcccgcagtaatggcttccagggcgctggagcataagagagaccgctttaagacgatcctggtaacgccctttatgtcgtgcagcgcaaggcttcccatatacgtgctgttttcctccatgttctttggaaagtacgccatgctggtatgctattccatgtatctgctgggaatcctgatcgccatcggcattgcctatatcctttcaaaaattgatggcagcaaggccgagcatgcgttgatgatcgaacttccggaatacaaatctcctaacgcgcgtacaatagcaatctacgtatggcagaaaatcaaagattaccttaccaaagccggaaccgtaatcttcattgcctctgtcatcatgtggggcatcttaaactttggcccgaatggatatgtaacggatatctcccagagtttcggctcccttgtcggaaaagcaatcgttcctcttttcgtgcctgccggccttggctattggcagatcatcgtggcgctgatcgcaggaattgcagcaaaagaggttgtggtatccagctgcagcgtactattcggcattcagaacatcaccaccgcccacggcatgaatgccatggtggccactttaggttccataggcttcggcgctgccaacgcttatgccttgatggttttctgcctgctctatgttccttgcactgctacgatcgccaccatacacagagaactaaagagttggaaatccacatttggcatcattctcttccagctggcggtcgcatggataatgagtaccatcgtttaccatatcgggctcttattctaaatcaagaccaatcaaactaaaaagataaaaatcaagaagaacggttatgccgcctgcacgctggctatgcctgttcttcttatttcttcttgcttatcttatttctgtagatactgtatctctataggatcaatggggtctaccggattctcgacttgtccctttaattttctcttgtgacgttttagcaattctccgcctttgttataaaaccagaacgaatataccagcaatttattcgctttccccatcttgtccttggtcgtctttccgtagaggacgcctcctgcctctaccggggccttacggcggatcaaagaaatcagttccgtctcgcatgtgacatactctggaatctccgtatacgcctttcccacgcaatccagcttatgggcatcgcttccaccaattcctggcttcttatacttgcgtgccagtttcatggctccttcgtttgattcttcggactcgcaggcattaaatgcctcgataaaatcaaaccgcttgataacttccggcgatttataaaacttctttgtatttgtaaaactcagatatttttccccgcatggatgggccggtccaagaatccctccatggcggtgtacgaaatctatcagcactgacacaggcatgcctcttaattccagcagcctcatcttaacgccctcaggcatgatacagataatatggcccgcgtcacaggtatcatactcgatccctttgagcaccacaaaatcttcgtgagccttgcctttcatattgtacttccaatgccgatatcctttataagtatcatggtctgtaatcagcattccgtcaaagccattctcttttaatttcgtaatatattcatccaagcttaccttgctgtcaatagagccttcttttacatgacaatgcatatctaatttcataagtaagcctcctttatgctattcttaggattattatatcacatttggctcaaaatacaaccaaggcggccgctcttgggttatattaccttcatagtattgatagagtatctcaccagcgccgcgcatagaatccatacggccatatagagaaatcccggtgcatccgtctcttggaaactgtataggatcattgccaatacctgaagaataatccccgcaagcatcaaaaaaattcttgtttttttatacataataaagcacctctccttctatagactttactatatcaggggaggtgtgtcataaacaggactccttaaatgtcctcttcaattatttcaatatcatcatcgctttcttcttgcgcagaaacttcatcttcctcatcttcttccaggatcatccttgctttttcaacttccgactccctggaaacctcttctttcacctttttggaatacacttcttccttcttaccaatttttctggaatgcatcataaactgaacaataattcctgctactgccagaacgatgctgattccatatcctaccagattattcttctccatgcctatcaatgatgctgccgccatgcccgcgcaaaggcctccggatattccggtaacgacaacaacgatgggctctatgtaaagaacagacagcactgccaatacaactgcaatcccaatgcatataatatacattatcatagatgatggattgatcactgccgcgcacacgccgaatccatagcacaataccagcaaaaatataccaatcttgcgcaagaatatggataacagcccgatgattaccgcgcccgccagtaacgcgatcaaaaatgtggttcctgtaagccccatagctacagccgcggcaactcccgccactgctcccagcacgaaccccacgatcgccgccagcagcctcattaacttcaacccgaacaggcaaatcaaaagccctaccacaaacgttacgatcaagacggccatacttggccgataggtacctgccaaaaatatgctgctgttgtctccaaccttgcctatcagttcatttcccatactcattacttcatccatatcttctgtctcctttgtcccttgtcaattattagttagaatccataattctcccgggaaggcctgctactcccttgcattcctcccgagcgataccattatagcatcttttttagttcctgtaaccacaaaaattatccctatgatagcgttccataatacagcagtaaagatgggcatcaattatatgaaataaatgacacccatctttactttgattcttcaatcattcttttacctctttcttttggtaaagttttttactgattattaatcagtttggatagtttaattttttggtggtccgtaccttcctttcttaaactatatcttattgaactttaaatactgttttgtattctcccttcaataagttgtgatctgatagatatgtacaatatcttcaaatctgtaataataaactcatctccaacaaatgttttatctgttttcttatcttgtttattatttatgtcattataatatcacctacttctatatttgtcaatattttcttatattattttttaattttctgttaatttacttactataaagaaagcgcggatgcaatgcagccggtggtttcttgtagtaagcataggtcaggatcttgaacgtggtcttaggatccactgccggatttccgcctgctcgccgaaatggatttcgggctcttcggggtccgttttctgtttttagacataaaaggggagccgttgctccagtagattattcatctacttttgcaaccgcccctactcttttaacgtaaatttaccgcaaatcctgctcctccggaacgataatcaagtctttggtaaagtggttcaacacctcgcagccatcttctgtaatgatcacgaggtcttcgatacggacgccgatctcttcatccggaagataaatgcccggttccacagaaaagcactggccaacctgaataatatcctcattgatagaagatacatcgccaaattcgtgatcctccataccgatagaatgacccgttctgtgtgtaaaatacttgccaaatcctttttcttcaatataatctctgcacgcagcgtccacatcacacattctgttgcctggcctggccgcttccagccctctcctctgcgcttctttcactatttcgtatacttctcttgccctgtcagatacttcgccaataaaaacggttcttgtcatatccgagcaatagttatcaagaacgccgccgatatccagcactacagaatccccgcgtttgcccttggtgtcattcgtcacatgatgcggatccgccccggatttgccataacaggtaatcggatcaaaagacacgtccgaatggcccgacttcttatacatatcacgaacgatggcgttcagctccaattccgtatagccctttacaaccaatggaatcaactgctccataatcttatcattttccagggaagcttttctcatcagttcctgctcatgctcatctttaatcattcttacataatcaacgatcagcgaaccattgacgaatttgcttcccgcccctaattcctgaagtctgagaaggaactttgacggccataccttatcaacgccgacaatcttgtctttctcgacaaactgacttaaaatttcaacgccgtcctggatgtcgctgtaccatacaagctctactccaaggtcttcgtcctgtggaaacaattcattaataaccagcttatgatttccattgacattcaggtagagaactaacattctttcgcccggtgcaaactttttcccaagcaaataataaattgccagcggatccgacatgataagctgcggtacgtcgtgctcttccatcgattttagaattctgcttaattttgcttcgtccatcataataaactttccctcctaattgtgttatgcatgatacattttatgtattgtacatttttaccttacttttttaattgtagtatagtattcattatgcactttgtcaacctgacgccgcactaaatggctcttgtatactgcttcagccattgtctttcttcttctgtaagatgcggtccgatcttttcgtacacttcctggtggtaacgattgagccattctctttccgatcggctcatctcttccggatcgatgccgtccaggtcaatcggagcaaaggtgatcgtctcaaagtacatgaactgcccgtatttattcttcaccccttttcttacgataagttcattctcaatgcggataccaaactgaccgtcctcgtaaatgccgggttcatcggtaataaccatgccttcctctaattgatgatgttcattcttacttggaactacataccagcggaaaccggtcggcggctcgtgtacattggcaagataacccacgccatgtcctgtaccgcactgataatcaaggtcaagatcccagattggttctcttgccaggacatcgagattatatccatagcatccatataagaatttggcgcgggataaattcatcatagcgcgcacaaccgccgtaaaatatttcttcatctgccgatcaacagaacccagtacaaaggttcttgtaatatctgtcgaaccttcataatatcctccgcctgtatcatttaagaaaaaggcgcccccttttaacggtacgtcggactcttcacacggagaataatgcatcatagccgcatggtctttataggcgcaaagcggttcaaaactatcgcggatgtatccgtcttgtgccgcacgtaaagcggtaagcttgtcaatagaacttaattctgtaatcacctctttatcatagtgattcttaacccaatacataaatttggtaactgcaacgccgtctttaatatgggcggccttgatattatcaagttcggtatcgtttttcatcgctttcataaggatagtcggattcgccgcttccactatgttacaggaaatatttttataaagcgcatagttcatcttcatcggatcgatcagaagcgtctcggaagcgtcaagcttttggatatcctggtaaatatcattgtaaggatgaagcgttacctttgcttttttgaattcattaagaatccggtcgtttaattttttctcatttacatagagttctacaccatccattcttactatggcataagaaagaagcagcgggaagtaatcgatatcgtcgccgcggacattaagaagccagcatatatcgtcaagggatgcgatcgcatgaacggtagcgccgtattccgccatggccttacgtacgcgctccaattttgacgcaatgcttgctccggtatatctttcttccagaaagaaagcgggtttatcggacaacgccggcctgtcctgccagatggcattgataagatcttccgaataatgaatctgaatccctttggaacccagcgccacttcatattcctggccttcgcccatggacagaacccgcccgtcgaaggcaaccgttccgccggacggaaccacatccgaaagatattctgtaatagtaggcgtatcgccgacaaacatcttcatcaatcggacgccggttcctgccagttcctgctccgcctggaagaaataacgcccgtccgtccaaaggcaggcatcgtcctgacatataacggccgttccgtaagagccgctaaatccggtaatatattgtcttgctttaaaatgctctcccacatattcgctttggtgaaaatccgcagtaggcacaacataagcagaaatactcttctctgccataagcgcgcgaagactggtaattcgttctgatactgtcatgattcaaaacctcctcttaaaaacatagaattcaaaagttattatgtgaaaaagagaccgctgacgcaatctctttttctctttctatgaagttgttgattattgggctttttccatctcgtccagttttccgctgcacgcccagagaataatgccaagaataataatgacaatcgctaatccgccgtagcccatagtaaagtccatacccttaagccatgcatataaagccgggtaagtcttctgggcaaggaacacggcgatcggccagaagccaagcagaagtcccagcaccttcgcaggcgcaagtttggagataaaggagttccccagcggggagaataccatctctccgacagacatcaacaggcatacaagcgccagccagaatacggagcactgtccgttcactgcggcaatcttatctgccacaaccattactatgtaagaaatacctaccagtataataccaagcgccgtttttttgaacatgctcatgtcgcccttcggtctcttggcaagtttggcccacaacatcgcaagtacaggacctaagattatacataccagagcatttacagaatcaaaccaggaagttggaatctggaaacttcctatataccagttggcaagattcatataatcgctgccgtttccccagccaaaacggaagtaagccggcatataagccatataccataccatccagaatacgctggagaacagggttacaagaacaattgccacaattcgtttgatatcgccggacgtcaatttcgtgtcgccatcctttttcttgctgaccgtttcaaattcccgctgatctgccttgaatggtttcttcccggcatctcccagagatcttccgttgagaataaaccataccgcgtcaatgaacatgaaaataccgcagattaaaaatacagtattgaaacttgtcttgaacccgaacaatcctgttgtagcgagtatcgcaataaatgtggtcccgataaaggaaccgatgttaacgaatgaatactgaatcgaaaaggccgcgtccaattcatccgcatcatggaacagcagaccgttgataccggacagattccccttgaacagtcctgtgccgactgctaccagaataatcatcgcccataccagcgtcagagaatctgccctccatgtacagaggtatccgaggcccataagaatcattcctaacggtacgcaaattctcgggctgatccaatgatccgcaatgtaaccgccaaaaagaggcgtaatgtacgtccaggccacaaaagaaccggacatggcagaggcttcaatatccgataatcccaagccgcccgatgcaacctctgttgcaatccaaatggctaacaaatacttcattgtgtaaaacgccagacgctcaaatgtaaaaccgagcgcgcagacataaaagccaaatggtcttcctttctttactttttccacttctcatccctcctgtgtttcataataatgcttcataaatccatctgctataaacgcagtatgtacacatttatgtattatagcataaagttccgctttatacaatcagaaattcatcagacgggctaatcgtaatgattcatccatttgatgagttctttgcagtaatcatcatgtctgtctacgaaacaggtatgtctggcattctcccacagaatccacttcgaattaggaatgccgtccgccagcgtcttggcaacaagaggagaacacagatcggatatgccgctgcagatcaaggaagggatctgaatctcgccaagcctgtcggtatattcgaaatccttcagtgttcctgtcggcgcgaattcattaggtccccatccatatatgtacgactctgaaccagattttttcggtctggtgcagcatgcaggggcatcctgcccaagccagtagttacagtatctgtccatgtattctgcaactgcggcatcgtaggcctcgccggtgaaatctcctgtggtaagcgcatggttaatggcgtcctgcatctcccgaggcatcattttgatccggcgcaggccctccttctcccagagcgagctgcttgagtgcccgctggatatgatgaaactcttgactccctttggtttacgttcaatcgcataggcaatctgcatcatccctccccaggactggccgatgatgtggcaggtatccaatccaaggtgcgctcttaaagcatccagttcatccagccagacgtcctgattccacagttccggatgcccgtcaagataagaattgccacagccaatctggtcatacatcacgatcatccgggcatcgtcatctgccagattatccaacacctcataataattatgggtagagcccggccccccgtgcaggcagatcaacggcgccttcccattcggctgcttctcaccgacaatcctgtaataggtctgatgctccaggtatggcatatagccttctgtaatttttgtcatgcttcataatcctcccttcggataatttttttactaattgcagtataatatataaacagcaaaaaagaaataactttacttttccctcatagccaaacgcacatccaaccagcagttttacataagtcatctcctccttttcgtctgcaacggctggaagtaaaaaaagagtacctttcagcaaaaggtactcccggtcatacgtttgccttaaaatgcaaccgctcctgtctctgttccattgataacatagtacacggcgccttcttccggctttatgtatagatccatagacttaatatctccaacctttttcccggtacttgtccaggctttctttacgctggctatgatatctttctcttctacctgtttcccgtaatattcaacaaaggcatttacctttatctcttttttcgctgttgtcttctttgcagccgtcgtttttgttgctgccttcttcgtcgctgttcttctggttgttgctttccttacaggtgctttcttttccgttgctttctcagctgcaggagttttagccgtctcagccttatctgctaccggtgttttctttggctctgttttttcaggctcagccaacttgactgtcgtttttgcttcagcagcctgcttgactggctcttttgcttcagcagcctgcttgactggctcttttgctgccgcaggttttactgtttccgctttgactgctgccatatcagcagatgcagttgtcaccgccgcagttttgttcacagtttctgttttcttggttgctgatgttactttttttgtggccatgataattcctcctcatttctactaagcctcatcacctagtcctgaatattatagcacattcttccaaaattgcaattcttaccaaaaattccatgatattgccagtatactggcgattcaaaccggcaaattaatcaaatttcgccaattccccttctacctgcccgctacccctgcaattatcatgccggctgctactgccaccaagaacaggactccgacaatcttaaggttttcccttctattccggttcatcttgaacagaaccacaagtccgacgcctgcccccgtacacagtccggcgatcactgaagcaaaagaaatcgctccgttcagatacagctgggtcagaataacggatgccgcgcagttagggatcaggccgatgatagccgcaatcaccggctgaaatatagtattccccagcagaaacttagataactgttcaataccgaagatttctatgcaaagattcaagattccagtaaatataaaaagataaataaatattcttattgtatgatgccatgcaggcttccatattcccgcatcctcttcatcgcatccacagtctttgcacagattcccgctttccttgactgtggcaatctgattccgaaagaagatgtctatgatatatcctgccgtaaccgcaatgattacctttgcagcaaggagaactcccacttcccggatcctttccgggttgctcataataatcaagacagcctcatctgatgtggcaataaatacagacagaagggttcccaccgatatgattccgcttgcgtacaggttcgccgccataaccgagaatccgcattgaggcacgcatccggcaactgccccaacaaccgggcctgctttccctacttttgccagcgcctttgcggtaaagtcactggagtaatgttccaaagcctctattaagataaatgccacaaataaaaatggaagcatcttcagacagtcaaaagtggtatccataacagcatccactaacattttcatatatatcctatcctttctgttccggccaataagcctaatagatttattttagatgcttctcctataattttcaaggacaatttaaaagaacacgccatctattgcccgctaatgatcgacaaaaattgacagacaactgaatattttttaaatttgcacttgacttttttcttcataagttaaaataataccataaaagacgatgttgattcatccaaatgcaggcaggggcatagtattcatccaaatactatgcccctcgtacatcctaagactaccagcctttatacagttcttctaatatatctaccgtcttctccatgccaagccggcttgcattcagcagcatctgatgcgcctgcacgcttccccagtcaagtcctgtatgggactcataataatacttgcgctcacggtcaatcttcttgatccgatctgccgccttacgttccgacagatcatatcgctgtgcaatcctcttaatccggtcttccttatctgcacagataaagacattgattaaattaggattatctcttaacacgaagtccgcgcagcgcccgacaataacgcaggatcctctctcagccagtttgcggatgatctcgcactgcagttcatacacttgctcgctaagcggctgtatgtattctgtggcattgatataagtggagtactccatcggcgcaatcacatagcctgccaggaaactgttcagcgtcgtctcatccaccgcctgcgcggtctcctcccggatatccagtttctcggctaccatcctcaccagattattgtcatacagcgggatatccagccgtgttgccagccgattgccaatctcatgcccaccgctgccaaactgacggccgatcgtaactattttatgctctgccataccgatccctccctttccagaagactttataacaacgactattatttatctttattatacatctctttcaagggaaaatgccactaaaaacgtaattttttctaatccgtcagttcttcgcagcgttccgtcgaatatacgactccttccttcatgacaaaagcacagtcaagaagcgcatatggatctgtcatcaagtctctcttccaagctgcgatatccgcatattttcccggctcaagcgtgccgatcttatcctccagctgaaggatctcggaattcacctgggtcgcggcatgcagcgtccggaaggttcccatcccgctttccatccatgccttgaactcgtatccgctctcatagttctgatgggtcgcaaccatatctgttccataccccagcttgcacttgcagttcttgattacttcacggcctgcctgaagggcatccttataatattccagcttgatcctgtattctttctgcttggtctgtatcatcacaggatcatagtgcacggcctcctcatacggacagaatgtaggaactacatagacatcgtgatcaattatcatctgggccgtctcttcatccatcaaagagcagtgctccatgccatcgattccatacttgatcagtttctgcatatgatccacgctgtatacatgcgcggttaccgtcttgccccattcatgggcggtattcatgatcgcctgaagttcttcgtcatttagctgctgctgggatgggttgtcattcggagtaaagaatccgcctgtagccataattttaatgaagtccgcgccatacttaacctcttcccggacggcattgacaaaaaagtcttttcctgctcccagcgtaagccggacgttctgcagcatattggacagttccggattccttgaaaatccttgtgacaggtctccgtggcttcctgctccgcataagaacctcggcgccgctacaatcctggaacctgtaatatatccattttcgatcgccctctttacatccagtacccccagtccgttggatgagattccacccggatgcctgaccgtcgtaaaacctcttgataaactcttctgcgcggtccttacgattgccaacgtcttagcctcttccgaggtggtgtagacttcttcccgaatagtatgccagtcaatatagtccatatgcatatgcgcatcaatcattcccggcgtgaccgtggcatcggaaaggtcaatgacctccgccgactccggctgcgggatatccggccctacggcttctatcaaatcgttttttaccaagatcttatagttctctttaaattctgcatcgattccattatataattttccacaaataatatatgttaatttatccatattcttctcctttacaaaacatttactatgaatcagtttcttcctgctctttattccttccgctcttgtaatcgactacatatatgaccacagatattgcaatggctatcagcatataatacgcgctgttcatagtcgtaaaatagcagaagaacaggcagattgccaaaggcgcaaggaaaaacaggaactgtttctttcctttcaggatcgtctgtgccacaaggcctccgaacagtgcaggaaccacataatcaaatgccggctggatcacaggagactccagaaccggggcaagcggcgccgcgatcacgactcccagggccacgataacgacggtggtgataatggacgctccacaggcgatgatcgccatcgtatgacattcatccgtattgggcttgatgccaagggaattaatggtaccaacggtagcaggcattctcagatttgttacattccccgtaatataggacatatacaaagcgcctggccccattactgacatatatccgatggtctccgccggccagtatggcgccataaacaagataacagccacaaatccgggccataatgcttcaaagtccggccatatgccatatgccgcgcttactacgattggaaatgcggtcattcctacaaacagcagaagacttgaaataattccaaacttatgtatccagctttgatatccgttttgtttcatatgatgcacttcctttcttaaaagatgaagcaggcggcagccattgcaaccagcatgctgatggtcatcaggtaatccgacagccatctggctttcggccgcttattatggatgaataccaaaattgcccctatagcgaaactgatgcagaaaactatgccttttgtggacatagcgctaaatccataagatacggatacgtatgccataacgcctgccagacatccgcttccgatggagagcaccagtttcatatccactttttccgctttttcataaatcaaggatataggcttgattgccagggatgaccacaatacgcaggcgctgcctccgatcgtcatgacccaggcggccgcaacccatccgacaacactgtatccgttgacctgcaaagtctctcccacacactccagagccgtcgatgccgcgtatgtctcataataggccgatcctattatagaaagccgcagccatggaagcggcgttcccagaagcggcatcaaagacagcagcaccagcagaacaggcagcgtcggcatgatactgatggtaattcccgttgtcagccccttcttaatctgcgccggctgaagcccaagttcaagcgcgtgcttccatgccctcttcataaatacaagacattggaatataactgccagcagcagcagccccacccataaaaacatccatacggcattgcatatttccgtgtaaatcatatccctacctccaatcactaaggtgaatcatttgttattagaaaccgtggtctgttatagttattataataacaatccttaccataatatgtcaacaaatttattattcattttacttaattattattaatttttagaaatattattgtattattttataattaacagtcttttgtgtacttgtatacaacccttttgttcttgttttttacagactaaagtctttaatttgtcaaaaaaagactcctttcggagtctctttcttccctattctagtctctcggcctcatgaattcaatgtacaggtcaaagttcctgctcccaaaatatcctagtgaaaaggaaccgttctgcacgcaccaatccataatgatgcctctttccaaaagcagtacatgatgcgcaagttcttctaccgacatatcctcccggatctcatgctttttctggccttcggcaataatcttcctgaccagcctgttataaaaccggtctggattcaggaagcagtcctgcttcttcttggtcagttgggactgatacaatgccgccaaaagttccgccgatacattaccttcaatgaagtatgaaacatattggcttaactgttcaagctgcacgatactgtccaggcttctgtccatagtctcatagaatttctcatattcccggtcaaaaatggcatacagggaattcagcagttcttccttcgctttaaaataataataaaatccccctttggacgtattggccttctttacgatatcattgacggtggtattctcatatccctgtttataaaatagttcccaggctgcatctatgatctgctttcttaaatcttctctctcttcatgctttgccatataccctcttcctaccttctctgttctgttgtctgacagcgccctttggctagtcaaacaacggcgttgagaaatacctctcggcagtatcagctaatatggtcacaaccgtctttcccggtcccagcttctttgcaagacgaagggctgcagccacattggttccgctggagatgccgcacatgaggccttcctttgccgccagttcctttgccgtcctcactgcctcctcatctgtgacaatcgcgatatcatcatagatctcctggttcagtatggccggtatgactccatcgccgattcccatctgcagatgggatcccacctctttgccggacaatattgcggcattctcaggctcaatggcccagatctccatatctggatttgctgccttaagggcttcgccgataccggtgatggttccgcctgtgccaatgccggagcagaagccatgaatcggctttcctgcctgctccaggatttcctttgccgtctgttccctgtgggctgcgctgttcgcttcattttcaaactgctgcggcacatatacgtttggatcttcctttgccatagaaagcgccgtctccatgcactttgcaatgcagtcgcctatattccccgcatcatggatcaagatgacctgagcgccgtaattcttcaccagctttcttctctcctcgctgacagaatccggcataatgatcaccgtcttatatccctttaccgcgccgataagagccaggccgatcccctggtttccactggtcggctctacgataatcgtgtccttatgaataagccctttcttctcggctgcttcaatcatattcattgctgtgcgcgtcttgatggacccgcctacattcaccgcttcgaactttaccagaacttctgcctcatccggccccgtcatcctgttcaggcggatgaggggagtatttcccactgcttctaatacatcattgtatatcattgttcatgaccttccttttgttattcttataattagactatagaacaaattggaaaatgtttcaagtattatgcagattccccgattcgttcccccatctttacgatcgtctcgtatcccctgcccgtattcaaaaccagctgctcttttggatgcaccgcgccttcctgaaacagcaggatcaccgtagatcccccgaattcgaaccgtcctttctcctggccccgccttacttcacaggcctgatgatagttggtgatgcgccctaccatcagggcgcctacttccatcatgagcaccgtcttgaaatgccggctttttaaaagagaatactccctggtattctctttgtagatgggaaccatatcattggccactggattaacggtatgaaagaccccggggatatggatgttacgggattttctgccttcgtcaatatagcagtatctgtgatagtcgtccaccgtaagccggaacacgaaggcccatccgccatcataccgttctgcaagcctcctggaacggagcaggctctcaatcgtatacggcgtatccttaatcacaaatgtgccttctcctgaccttccgcttttgataggataaacgcttaacttcccgtcacaagggctggtcagcgtctcttcatctccctgaggcatacgatactgcggctttaactttctggtaaagaaatcattataggacgagaattcctgcctcaggcagcaggaaagatcaatcctgttttttctcacaaatggcccgatcagacatcgggaccagggttgctccagaagccagccccctaatcgggatacccccggacgtgtcatggctttcagaaagattcttcccgcccggctggtatacaggtgccgaagcagtctgtcctgcccggattcttctatcgtctcttttccgtctctgtcaatatatttcatcatttccttcacgctccatacctgtaatgcaagcctagtgcacccatcttgtgaaccagggccatcctgtgtgaaaactgattcggtaattggtaaaaatcagcatgatcagcacggcaacgccaaccactgctaccaggactgccaaagtcgcgttattgggcttcttaagtttgaaatctactacaaacaggatgcctacgataatcagcgccaaaaccaggcaaagccggaatatgtaatctggcacgaagaactgtaccataaataccagcggaagcacgatcgccatggatgtaatcggcagcccgcggtagtatttctccccagtctccgtcaccagcgcattcttggcttccatcacattaaaatatgccagccttactacggaattaacgcagtataggatgattgccgcaattccaatgggtccccgcactcccagcagatagcagatcagcgccgggaacgcgccgaagcagactacatcgcacagcgagtcgatctgaattccaaaggccttctcatcctcggtcctgtctttcttagtacgtgcgatcttcccgtcaaacatgtcgcacagtccagagatcgcaaggcacaggattgccgtcttgaatctcccgtgaattgcctgcgtcattccgaatacggaagaggcaaggcttatatacgttaatactaccgtgtaattataatatcctatcattcttcttctctcttttcttcattcttttctcttattccacagccggatcccggccaatccttaaatgggcgaataatgtcaggcctgcgcagagcagcagctggatataatatgcgatacctctgctgagcaccattcccggcagcagcagccccgccgtaaatacccccctaaaaatgatcaggaaaaggttctcgctgatccccatccctcccggaagcgggagcatatctaccgatacggaaaccactgcctgcagcattaccacgtcatacatatgggcgccatggagcccaaaagccttatatacgaaccaggtgacaaaaaacagggcaaacctctgtagaaatgtaatcgccagaacatttatgataacctttccatgcgttctaagatacaccgccgttgcattatactgatccatagatgcggacagcctgcgcgtacgttccggcttgtactttaggattcttaatcgctccagcagtttcaggcatttcatcatgatccattttgccagggccggatgaaacgccagaacggacatggcaatacagcagccaacgttcagggctacccccagatagaataccgggagaatcccctccaagtaccggtgaacgaatcctctctggaagaacgccacaaaaaggccgatcactaccagtacggacttatatgttattgtaacaatcatcagaaccaatgtcgataccggaatgggaattttattcttccgcatatagtagatctgcattggctggcctccgcttgccgagggcgtgatggcgctgaagaagaaccccacgcaggagtatagaaaacaggtccatctcttctcatggatcttcagcgtgcgaaacatataccagataattatggactctccccatatgaagataatgactcccaggcctcctggcaggatgtaccagggattcaccttaaggattgcccgcatgaccgctctaaaatcctcgcctttgaacacgctgtatagtgtcagcgcgaataccagcagtagaaaagcggtattggcaatctttttctttttgcttgtcacgcttccccttctttcctgcttatttttccctgcctgtcaaagattcccctgtacagccagtcgaatacccgcttcgggccgcggtaagcctgcgtatggaatgccagccagtaagtcagttcggctatggcaattcctccaaacgcatctatgatataatgctgcttcgtcaactgcgtagagacgcagaccagcaacgcaaagatacaggaaaaggcccggtaagccttaggaatattctctcggccccggattccgatatagcagaaccagctgaccaggcaatggatggacggaaacagtcttgtcggctcatcgatactgtatatcattccaagaagcttcacaaaaatatcgtctcccgccaataccggacgcacattcgtagtcggcagcaggatgaatatgatgccgctgacaattcgcgatagcatatctgccgtcacgaaccggaagcagtgttcttctccctgccttgcaatcaatatataattaatgatccagaatatataacagcccagataaatgacagtagcccctggcaccagcggaatcgccctatcaacaggaagcgtcaggtcatagtgcttccagtttcctgtcaaggcttccgttccgaaataaaccaggctattcaccgccacgcaggacaacagcggaaaaaccgcgtataggggcaggaactgctgcttttttcttctcttgtcaaccatatcttctctctccttcttacctgcctacaggacattataacagactttaagcaagaagcggcatatctttaataattcttcataattttctttctaaaaaaattccctgaaggcagcgtaacatatattttgccttcagggaatctctatatacagtctgtcatattatttgccacaagggaccaggaagcccctctgtctcaagtcttcttctatcatatccagcgtctccttgctatcggcgcttacacggtggtaatggtaattcgaagtaatattcttaagagggcttgacttgccgctgcggatatcttccatgaactccgccaccttccttctggaattcacgccaagcactgcctccatatggccatagacccggtggttgatcatgacattctccacgcatccgcccagatcgacgatggcgcacagttcttcctccagctgctcatccgtatgctgtaccttgaaatcccggctcaccgactttggggcattcagaatatacccccggttagtagatattatatcatagccggaagcccggatcagcgcgatatcctgtacaatgacctgacggctcacctcatatcttaaggccagcttcgttcccgataccggagtcctgctttcctttatctgttggataatatccgcccttctatcagaaccagtcattcgttctgtcacctcctgaaatattttttgtcttattatactacatgaaggttcttaagggaaatatccaatattggagcagaatgggtcaatgcgccgctggaaatataatcaacccccagggatgtcaggcggctgatattctccttcgtcacattgcctgagcattccgtctcggcgcgcccgtctatgatgcggatcgcctcttccatctcttcctgggacatattatccagcatgattatgtccgcgccggcttcaaccgcttccttgaccatattaagattctctacttccacctctatcttcctcacaaaaggcgcatactcctttgccatccgtaccgcctttcctacgccgcctgctgctccgatatggttgtccttgagcaaaaccccgtctgacaggttgtagcggtggttatacccgccgcctacgcggactgcgtatttttcgaagatcctcatattgggggtcgtcttcctggtatccagaagttttgtcccgctgccttccaggagcgctgccacggaatgggtataggtggcgatgccgctcatcctctgcagatagttaagcgcaacccgttcgccggacagcagaacacggatgtcccccttcacctttcccataagctggcccttctttacttcatctccatccttacagtaaagttctaccctgacctttgcatccagaagttcaaacaccctgccaaatacctccaggcctgcaatgataccatcctgcttgcagatcagatccacttctccttctgccgcttccttcattacggcattcgtcgtaacgtcctcgcttgaaatgtcttctcttagcgcttccctgatcagatggtctacctgcagggtcatcgtgatactgttcatatgtcttccaatctccttttcttccttcttacgccgtctcttgcgccacttcttccttctccatagcatgtccgatctttctggctgcccgcttggcaaataccatgctctctaatagagaattgcttgccaggcggttggcgccgtgcactccgttgcagctggtctcccccaccgcatacagattctccatgctggtttggctgtccaaatctacccagatgccccccatgaagtagtgctgggccggaactaccggtatgcattcttttgtcacatcgtacccttcttccagacagtgctggtatatattagggaaatgcttcaatatctgctctctgggaatgtgctccatagatagccatacataatcggtgccatccttttccatctgtctgtggattgcctcagtaaccacgtcccttgggagcagttcgttgacgaagcgttctttgtctttattatataaaacggccccttctcctcttacagactcggatatcaggaatcgcctccctggcttggtagaatacaaggtagtggggtgtatctgtacataatccagatgttccatccggattccatgctttcctgcgatctcaagcgcatcccctgtcaaatgcggaaagttcgtggaatgcttgtatcttcccccaatccctccgcttgccagtatcgtatccgccgcatggatgatcagccttcctttggaattctctgctataatgccgctgcatcgcccattctcttctatgatatccgtcatcgtcgtatactcatagattgtaacgttatttagttttttcacttgcgcaagcagcttgctcgtaatctccttgcctgtaatgtcctcatgaaacagtatgcgtggccttgagtgggcgccttctctggtgtatgcgaattctccgtcctctttttcgaattccacgccatatcccaccaggtctttaataatttcctgggaaccacgtatcataacatccacagcctctttgcggttctcataatgccctgccttcagcgtatcctcaaaataactgtcatagtcatccaagccccgcatcacgcagattccgccttgcgccagaaatgaatcgctgctttcaaggtccgacttcgttatcatcacgattttcttatccgccggcaggcttaaagcgctaaacagcccgcccacgccgctgccgatgataaccacatctgtatttaactccattttccaatcctccctggatgaaccatcttcttcataacctgccatctatttcgccagctccaacattctttccagcggctttttagagttcctgcgcagttcatcggctacatgaatctcattgtccccattctccagaacatggaggatcttctccagcgtgattgtcttcatatcttcacagactggctccgtcttcgtaaaatagaaccttttttccgggttctgcttttccagttcatagcgtaccccattttccgtgcagatgataaattctttattttcactctttcctgcatatgcgataatgccggaggtgcttcctacataatccgatatctttcggatctcttccgggcattcagggtgcgtcaagatcaatgcctccgggtgctgcctcttgacttcctttatctctgcgatctgcatcttctcatgtaccggacagtatccttcattatagacgaaattcttctccggcacttgttccgctacatgatgtgccagattcctatcagggataaagaaaatattcttattgggcagcgctttgacgatcttcgccgcattagcagatgtcacgcatacgtcggaatgccgcttgagttccgccgtagaattaatgtagcataccactgccagatcctcgtatgtatcccgcattttgcttatgatctgagcatctgccatatgcgccatggcacaatctgccgaggcatccggcataaggaccgtctttcctggattcaggatcttggcgctctcgcccatgaacgacactccggcaaatataatagtctgttctgtcagacccacagccaccttactcagatagaaggagtccccaatatagtcggcaatctcttgcacctcgggcctgacataatagtgggccagaatgaccgcgttcttttcctcttttaactttttaatcttttccgtgatatccatagcatttttctccttaacttgagttctcactattataccaccgttctttacatatgacaagacagataagtttacactcttacgtaagttctacgattccgctctaccagctgaatctttccctgatccatgaccagcacttttgtgccaagtttcagcgtctccgatatatcattcgttacaaagagtattgtgatatgagtctgtgcatagattctctgcaattcatcctgaagccggcccccgggtaatctcatcccctgcccaaaaaggttcttcttccaggccaacggttccatccatttgcccagagcctcccgggtacattttcataggatatgttctgctccaccgtcatatgcgaaaacagtacgctaccttgtattgcatatccgatattcctccgcagttctatcatatccttatctctccattgataaaaatatccccggcatccgctttcacgaagccattggccatcttaagcaccgtcgtcttttccgagccggaagaaccaataatcgttacgaattcacccttttccatggaaaagtcaaaattctccagaatcatctggctgccatacgccttttttatatttttaaactcaatcgccttattcatctgcatctctccttacttcaaaaggcctgcatcctgcaaaagtttctccgctactactcttggctcttttccttctgactatactgcataattcatctgcgccatatcctggtcagagatgattccagacagtttctctttatattctttctgcatgtctttaaacaggtcctcgctataccgtccgtcttttttcatcaccatattccatccggtccctgtatattccgaatacagatcaaactctcctttttccatccccggctggatattggatgtgccgcatccaacgccttgcgtaacctctgccttcatatccgcgtcctgctcaatcatcctatccagcatctcacccaggatggactgttccgtcataggcttcatggttatcttaagcgtgtctttctccctgccggcaaatacctgcccggcaatgattcccaggcaggccagcgggcaatgactgcaagaatatgattgacccttttgactaaaagatatacgtctgctgccagaaaggaagggattgccgacttcattctgattggtcagatagcagaaatccgtacgatcctggtagagttagatgaagtgccggatgactgaccattgtagatgagcccgatgatttcaaggcggctcagcatgcgatccttctggcctctaccggcaaggcggatgcccttatgaagggtcttctccacacttctgccttcctaaaagcaaacttccacaagaaatgcgggctggttgccccaggctctcttgttaaccaggttacgctcactgagttcccggcacagaatcggctcgtgctgctgagcgactgtgccattaatgtctcgccttctataaagaaaaggtgcagatcatacagaatgcagtcgccctggctcttaggctcggaatggaatgccctaacgtggcctgccttgcgtcggtagaagtcataattgaaaaatgcaagaaaccattgatgccgctatgcttagcaaggccaatgaacgagaacagattaaaggctgccgtatagacgtccctctggccggtttccagtaaggcagatattctgctcatgccggaccttttcactgtatttaattggtacttggcctaaaaatacacttctctttatatgtgctccattaaatagacgccccattttgggatgtctaagttacaaccaccacttcaagtggtggtttagccttagccctccaaagggctattgttactgctcgccccgaagggcggtatcgcaagcacttttactggtccgctataaagcggcacctcttgaatcttcttttcttgaatcctctgcttgctctttaatatacttctgtactgcttcgtctgtaatattaccaattgtttctacgtaataccctcttgcccaaaatgccttatcccacttactttgtaattcgggatgcctatcatatagcattaatgtactttttcctttcaaatatcccatgaaatctgatatactgattttaggtggaatcgctacacttaaatgtacatgatcatcgcatactgctcctgctactatttccacatttttatagcggcataagatgctaagtatttctcgtacatcaactttcaatttcccatataacactttcttgcgatacttaggtataaaaactacatggtactggcatttccatcttgtgtgtgataaacttttattgtccataaggaccacctcctatgtttgagtttggcttgcgataccattctcattgtatcataggaggttttttattgatatcatacacgcttctgcttactccattctccccagcatagctgggggattaggattttcatttatttttcttatcattatataaaaatctataattttacattatgatatgattgtgatatattttatacggaacttaaaggaactcttgtttctgtaggggagtcccttctcttaccctctattcaggaaaggaagtatcttcatgtacgatattattattataggcgctggtccggccggtatcagtgccggaatctatgcggtaagccgcggtaaaaagacagtgattattgaaaaaaatgcagtaggcggaatcatcggcaaagtctccaccgttacccactactctgctatcgtgcccggcgaaaccggagccacctttgccaagagaatggaacggcaggctttggaggcaggtgtagaaatcatctatgaaaacgttgaaaaagtaactctggaaggtgatataaagacgatacgcacatcccgtaatcattatgaagcaccaaaaatcatcctcgcaaacggaaccacccccagaacgcttggcattccaggggaggccgaactctctgggaaaggcatcggccttaatgctgcaaaggatggcccatcctataaaggcaaaaatatatatgtagtaggcggcgctgacggagcagtcaaggaagcactgtacctgtctcagtttgcccaaaaacttacaatcattcattttgaggatacattgggatgtgttcctgaattcttaaataaagttcatcagacagataacatcaaggtctgtctcgcctccagactaagcaaagtgtacggaaaaaaccatgtagaaaaattggagctccttaacgagaaaaatgggacggttaatgttatcgaagatgacggctgtggcatcttcgtatatgcaggcgctgatcccaataccgaattatatacggaacttaagttagacaacggatatattccggtgaacgaaaaaatggagacctccattccgggcgtatatgctgctggcgatattcgcgtcaagcaggtgcgccaggctgcaacagccgtggcagatggtgctgtggctgcaattaatgctgcgatgtaggtgcttggcttggtattgtaatcagggcggcggagaaaaatctccgccgccctgaactataggcatttgctttatataataaaaactgataaatctttacgcatttctgcttaaaatccattttatttccctttaattgtataaatatagcataaacatattgattaattcttaataacttcgtagtatggtttgttttaaaaaataggccttgcttattttgcggtaaaaggctgattttcgattcaaaatatgtctttcatactctaaaggacgatgtagtcaagccattatgcccattaagaggtatcgatattcgaattctcccaagtggatcaaccttgtacaggagcgcctatatctactatggtaataatccaacctgcgttcccatgtggggaacgacgcatttgactttgcaacattactggctatgctttaatttcaatccaagttcccgcatgggaacaacgcattggcagtatggctgctcacagccgtggaatatttcaatccacgttcccattgcagggaacgacccggaaatacgggcttgtggattactacaagaatatttcaatccacgttcccattgcagggaacgacgttcttagaagattttaatgcattattccctgtcatatttcaatccacgttcccattgcagggaacgactctttttccggtgcgtctttatccgctttgtaaatttcaatccacgttcccattgcagggaacgacaaatcgaatgccaataccatccagatcgagaaggtatttcaatccacgttcccattgcagggaacgacgttaagatcaatgccgatcgcatggccgatctctatatttcaatccacgttcccattgcagggaacgacagtccccgtgctaatatattttcaaggggagaacatttcaatccacgttcccattgcagggaacgacccagcagctctgcatccgcaaactcatatttcaatttcaatccacgttcccattgcagggaacgacttaggaaagccagaaggaacagtgaggcgctggaatttcaatccacgttcccattgcagggaacgaccggaagtagaataggaggataacatgaacgcattatttcaatccacgttcccattgcagggaacgacggctgaccaattacaggatagagcagctggaagaatttcaatccacgttcccattgcagggaacgacgaggatatgcttaataaccgattatcggaagataaccatatttcaatccacgttcccattgcagggaacgacgctgttggcatggcatcatcctcctttttgggtatatttcaatccacgttcccattgcagggaacgacagtcataataccatttttctgcatcatcatcaatatttcaatccacgttcccattgcagggaacgacgacggcgcggtgatccgtaagaatgacattgttgtatttcaatccacgttcccattgcagggaacgactgtctccattgcacttgaaactatttttgatatatttcaatccacgttcccattgcagggaacgacgatatacaagagaaagcggtgcgacagtttttcaatttcaatccacgttcccattgcagggaacgacgaattaactggagacgaggcatccaccgagtatgtatttcaatccacgttcccattgcagggaacgacggaaggcagggacccaatgaaagtatgaaaaaaatttcaatccacgttcccattgcagggaacgacaatcaatgtcttttatggccttatcaatatctgacatttcaatccacgttcccattgcagggaacgactagagcctccgtctggaaaagatcatcttatattatttcaatccacgttcccattgcagggaacgactagttggatatgatgaaaaaataatgaattttaaatttcaatccacgttcccattgcagggaacgacagcaaacttatccaatttttaatatataactgcaaaatttttgtgctatattacagttacctttagatacattctctcatctaatctatattgtaatacaatacaatatttttgtgcaacttttttggtgcgaatatcctgggatttttatgtacgcttcacattcgcactactgaatcgatatctaattttcaaagaaatttattctttttttatatttctaatttctcaattagctttttcataaagttttaatgataagaaggactgccgtctcgaactcctttagacatactattccaccacccttaattcttgttggctatagtaagaaaatctttctaacaatattcaaaagacgcagaggcatactgcccctgcgtcaaaataacttgtgatttaattatgcattcttttctgcgattgcagcctgtgctgcagccagtcttgcgatcggcacgcggaatggtgagcaagatacatagttaagacctaacttgttgcagaattctacagaggatggatctccgccatgctcgccgcagataccaacatgaagtttctcatttactggtcttcccttagcgatagccatttccatcaatgagcctacgcctgtctggtcaagtttagcgaatggatcgttctcgaagatcttagcatcatagtaagcgtctaagaacttgccggcgtcatcacgagagaagccaaatgtcatctgtgtcaagtcatttgtaccgaagcagaagaagtcagcttcttttgcgatatcatctgctgtcaggcatgctctaggaatctcgatcatggtaccaacttcgtacttaaggtcgcttcctgctgctgcgatttcagcgtctgctgtctcaacaacgatcttcttaacaaatttgaactctttgatatctccaactaatggaatcataatctccgggcaaacgttccagtcagtatgtgccttctgtacattgattgcagcacggataactgcttttgtctgcatcttagcaatttctggataagtaactgcaagacggcatccacggtgtcccatcattgggttgaattcgtgaagagaatcaatgattgtcttgatctgctcaacagtcttgccctgagcatctgcaagtttcttgatgtcttcttcttctgttggaacgaactcatgaagcggcgggtctaagaaacggatagtaaccgggtttccttccaactcttcaaacagtccttcgaagtctccctgctgtactggaagaatcttctcaagtgctgcttctctttcttctactgtatcagaacagatcatctcacggaatgcatcgattctgtcgccttcaaagaacatatgctctgtacggcaaagtccgataccttctgctccaagttcgcgagccttcttagcatctgcaggagtatctgcatttgtacgaaccttcattgttctatatttgtcagcccatcccataatccttccgaactctcctgcgattgtagcatcaacagtaggaatcaggccatcatagatgtttcctgtagatccatcaagggaaagagcatctccttcatggtattcttttccgccaagggtgaatttcttgttttcttcatccatagcgatgtcgccgcagccagatacacagcatgtacccattccacgcgcaacaacggcagcgtgtgatgtcataccgccacgaactgtcaggattccctgtgcagctttcataccttcaatatcttccggtgaagtctcaagacgtacaagtacgactttctcacctcttgcagcccattcttttgcatcatctgcagtaaatacgatcttaccgcaagctgctcctggggaagcgccaagtgcctttccaaccggcactgccttcttaagttcggcagtatcgaactgagggtgaagtaatgtatctaagtttctaggatcgatcattgcaacggctttttcttctgtaatcatgccttcatcaactaaatcgcaggcaatcttcagggcagcctgagctgttctcttaccgttacgtgtctgcagcatgtagagtttcttatcttcgattgtaaactccatatcctgcatatctctgtaatggtcctccagtttgtggcagaactctacgaactggttgtacacttctggcataacttctttgagttgatcaatcttctgaggagtgcggacacctgccacaacatcctcgccctgagcattcataaggaactcgcccataagcttcttctcgccggtagccgggtcacgagtaaatgcaacacctgttcctgatgtatcgcccatgttaccaaatgccatcatctgtacgttaacagctgtaccccaggaatatgggatatcattgtcacgacggtatacgttagctcttgggttgtcccatgaacggaatacggctttgatagctcccataagctgttcctttggatcagtcgggaattcttcgccaatcttttctttatattcagccttaaactgctcagcaagcactttcaggtcttctgctgtaaggtcaacgtcctgtgtaacgcccttttctgctttcatcttatcgatcagttcttcgaagtatttctttcctacttccataactacgtcagaatacatctggatgaatcttctgtagcagtcccaagcccaacgtgggttgccggacttagcagctaatacttcaacaactttttcatttaatccaaggttcaggattgtgtccatcatacccggcattgatgcccttgctcctgaacgaacagatacaagaagcgggttttctttatctccgaatttcttacctgtaatttcttccatctttgtgatggcttccatgatctgtgccatgatttcgtcgttaatttttcttccatcctcatagtactgagtacaagcctctgtggtaattgtgaagccctgtggtactggaagacctaaatttgtcatttcagcaaggttggcaccttttccacccagaaggtttctcatggttgcgttaccttctgtaaacatataaacccattttgccatttgtcatgacctcctaaactaattttactttctaagtcgcacataatattgtactggttttgacagggttcgtcaagggtttttgcttaatcttccggcactttggcatacatttctcgcatgcagccctcccgttcctgacgcgtctcatccaagtaaattacttttcctccatttttcctggaatcttccgccgcaagtgcaatgatatggctttctacggattgcataaccgagggtatggtattatccgcctcgccctctccggtaatcaggtcaaggaatgcttctaccatctttctctcgcctccgccatgccctgaaaagtcttccgcaagtttggatacatcaattatctcttctttcttgccaaatcttgaaagcgtaatcatgtttgccctcatgtccgcgataatctgccctctggttcccataaacttggtatagtgggaaacatccggcgtaaatccgctcatagcaaggcttatagttgctccatccatcatctccatattaacaatctggtggtctacgacattattgccgcaatcatagacgcatttgccataaggcccttcctctatagccttgcgaatgctggcctcatccggatatgcagacagtacttccgtcgaccaccctgtatttccggccagaacgcctgtatcctcattggttaaatagatcttctccgcatcaaagatacaatcttttttagatttgcagcctttcgtacatcggcctgctgcccctgtgggcgcatttttttcttgaaatgatatgtatttccaaatgaagatacggatctgcaagtcttgccagtaagccataggtacagctccatatcgtggcagcatttctgcagaatcattggactggtaacattagaatttgcccagttgcctcgtacaaaactgttggcctggtgccaatatcctacattcataatccccatgacgctgactacatcaccgatagttccagaatcgatgatcctttttatttcctgataaaatggcgtatatcttaagacatgacataccacaacgtttcttccatatttttctgctgcctcttccaccatccggcactccttaaggttcggcgatatcggcttttccagcaggatgtcataccccttttccattgcttttattgcctgggacgcatgctggcggtcctgggttgttataaatgccgcatctgccagttggtcctgctccagcatttcttccgcactactaaaacatttttccaaaggaatatggtaccgcccagccacctcttctattctttcaggaatagggtcggctattgccacgtctttatacgtgtctactcatttcttcctcctctgtctggaatcctcgtatttttaacactttattacagtcacgaaaaggaagtggctgtttctgtcaatgtcatgagtcaaacgacaaatgagacatatttttgtctctgtactatattgaaccttgaaaatttaatacattatcttgatttttatgaatatcactgttaaaagaacctcgtttcagctatggacagagcatttggaatcctctttgttaagctatttccggggttagggcacacttgcccaagcggctcatatatttgaccagctttcgcacattcattgctgctaccttaaacccaaaatacagcctgcaacgtatcaatcctctcacaggcattttgtcaacgttatgtcgtttccttaatgctgccggaatggtttctactccatttctaaagtgggcatattctttcaatttttcagttttaaagaacctttgctgctctgcatggtaggaagttcgttttgcaagttttattgttgcaacccttacatggagttggggattacattccgcgaaatgtgggcatcccttacattgttctatcggaaaggatgctttgcatttttgtgtattgatgtcatatacattgcttttgggtctatgacctgcagggcaggaaatgatttcctttccatcctctgagaatttaaaatctgcatagatatctgccacatcagcgcccttgagatctgttgtgataagatgtacctttttttcagcggcctgctttacattttcgtatccacaatagccaccatctgtaaccagaatggtctcttcttcggataccggctgtttatccagatagtcctttacaaactgactgtcactgtagatgttcttctcaaactgataatcaacagctatggaattgtttttatctgctgtttcaactacatttgcgatatagccgcgatagtccttaccagcttttgcccgaaacgttgcatccggatctgcgggattttgaaggagctcagagttcatgtctgattttccggatttgaggatcaagttcccatccggttccttatcagtctgttcctcgatcactcttattaacagttggtactcacttgattcatcgtagcggcttccgcaggctgtgatgatccgtgcagcatcctttagtacctgtgtgattttactctcagtatcttcactccgattatgataaagaactcgattatgatcatcttcctctgtataatgaatgagggattttggaaatgcaccgtcttctgatttatgcatgaattttgctaaatttgcaacgcaggtataaagtaattcgagccgactcatttttttgatgctggaagcaaccataagagaatccattcgacgcattccggtatttattttcatcattttcgccatctcagacgacagaccaacaatacactgatgaatcagatcaattccggtgcgttcttcataggtattgcatctggcacgaaatcttcccaaagtacggtcatttaaaggctgttcctcaaagcttgttgtatggagtgcgtactggtaccggatatcaaacggaagtgtttcaacaatttcttcatcggtaagttgaaaaatctccttgatgattaaggcaccaatgataacattcaccggtgtgttatgtcttgaggggcgatcactacaaagaactttgaatggttcttcatcgattgcaggaaatatattttcagcaaagtattttgcccacgatttttcgagcatttttatttccctttgggttaagtttgcagtagcatcaaatatgcttatttgttgagatgaattgactgaaaatgacataatgaaacctcctgaaatccatctctattatactacatatttacaaggtaatgtattaaattttcaaggtacttatagtgttcatttgtcgggcaactcatgacattgctgtttctttcatttccttttttgctgtcttctggtattctatttgattgccagaaaggccttgtatcccttataagcctcatagacatctgccttgcttgtcacttcccagggcgcatgcatgcacagcactgcaacgccgctatcaatgacctccatgccataattggccataatataggcaatggttcctcctccgccaatatccaccttgcccagttcggcaaactgatatgctacttctccggcatccatggcattgcggatctcggccaaatattcagcattggcatcattagatccactcttcccccggctgcctgtaaatttattaaataccagtcctttggagaaaaatgcagaactacgtttctcaaaagcctctgcaaacattggatcataagcagcgctcacgtcagaagaaagcattttggagttctggagagttcttcttactttcagttcggactcatttccacttaatgctacaagttctgcaactacattttcaaaaaatctggaatgcatgcctgttgcgccaacacttccaatctcttctttgtctaccaggatacagcaagcggtgcggtcaaccttttctacatccagcatggcaaatagtgaggtaaatgcgcacacgcggtcatcctgcccataggccataatcatgctgaggtcaagaccgcaatctcttgcgcttcctgctggcacgatctccaattcggcggaaacgaaatcttcctcttccatattataatattcctgaaggagtttcatgatgttggctttgactgcctctttttcttccttgtccagatcgtcattctgttcgataggacggctgccaaatagcagatcaagtttctcgccttctatcacgacattcgcttttttctctaactgcttggatgccaagtgtaccaggagatccgtaatcacaaataccggatcctcatctttttctccaatattcacttctacaatagtgccgtctttcttggcgataacaccgtgcagagccaaagggagcgttacccactgatattttttaataccgccatagtagtgagtgtccaggtatgccaattcttcattttcgtagagaggattctgctttacatcgatacgcggggaatcaatatgcgcgcccaggatgttcatcccattctccagcggctgctcccctatgttgaagattgtaatactcttgtccatgcataccgcatataccttgtcgcctggtttcaggctggcattggattttttcacctcgtccaggcttttatagcctttttcttctatcatgctgaccgtcagtcttatacactcacgctcagtctttcctgcgtcaaggcaggatttgtatttttcattggtttgttctaattcctgcaattgtgcaggactgtatgttttccatgcattttttctgtccattgttttaatctcctttcgttcattatattataacacaggatagcaccatatgacacgtaacatttttaacatgaacgcgtaacacttttaactttaacacgtaacatttttataaaatgttacgtgttcccctttcataactggtgtactattttgcctaaactggtgtgtaaatatgaaaaataccctgtgctattctgttattcactatcaacctgattctttaccataatgcatatatcccgcgctttgcgcattgatacttttagcgtttgccttatctgttgaatatattcttctcggttttctttttcttcaaatacttggcttaatagaagaagttctttttgagaaaatagttcctttgccaaattcaaggctacttctattctttgttcctcaacttcgcaagtaatatcttgaaaaatttgattttgaatataactaaattcatgaaactcttcgaaatcgttataggttttgaaatgttttttatacatttcaaatgccttttcgcagatcaatccttgggtttccgtaaaatattcgcccatactgctatatttatatcggactaccttttttaccatttttgcctttactggattcatatggatatatctgagacaagtccagaaatatgactcactctcaatacattcactcataaaacgattttgaaaaacatgaccgtttctattgtgcttaaaattataataaaacgcgtattttgccaagactctggccataaatgatgataattcattgagttctgcccggaggataaagtgggcgtgattagacataatacaataagcataaatttctataccatatttctcttgaaactccagaataattttcttcagataaactttttcgcgttgctgatcaaatatcctctccttattgattccttttactaccacatggtataaaccggtaaaactttcccgccttcttctgtttttcacaaaaccccttctttcactttacacagggtatttttcatatttacacaccagtttgggcgatatagcacaccagttatatcacatggacacgtagcactttttaaaagtgctacgtgtccatgtgaaaaatgttacgtgttcattatttcatctcttctcgcacttctttgaagcacttaacgataaaatcaatatcttctttagtatggcttgcgcatacctgggtacggattcttgcttttcccttcggcactaccggataggagaatgctactacataaacgcctttatccatcatgcgttttgcgaattctgccgcagtcttctcatcgtacagcataaccggtacgcatgggtgggttcctggtataatatcgaatccgttgtctaccagttccttgcggtagtatgcggttacttcttccagatggtcacgaagttccgtgctttgatccagcatatcgaacaattcaatgcttgcgcctgcgattgctggtgcaagggagttggagaataagtacggacggcttctctggcgaagaaggtcgatgatttccttacgtccggacgtatatccgccggacgctccgcctaatgcttttccaagggttcctgtgataatgtccacacgtccctgtactccgcagtattctggtgttcctcggcctgtctttcctacgaatcctactgcatggctgtcgtctaccataaccaatgcattatacttatccgcaagatcgcatacgccctttaagttgcagatgattccatccatagagaatacgccgtcagtggcgatcaatttgattcttgctccagcttcatctgcttcttttaattttgcttccagatcttccatatcgttattcttatagcggaaacgttttgctttgcagagacgtacgccgtcgataatggaagcatggtttaattcgtcactgattactgcatcgtctgctgtaagaatcgtctcaaataatccgccgttagcatcgaagcaggaagaataaagaatcgtgtcatcggttcccaggaaatcagaaatctttttctctaacttcttatgtatatcctgtgttccgcagatgaaacgaacggaggcgactccatatcccttttcatcatatgttttcttagccgcctcgatcaggcgcggactgtcgcccagtccaagatagttattcgcgcacatgcagagaagttctctgccgtcttccatcgtaacctttgctccctgaggagatacgaacggagcctcgcccttaaaaaggcctgcctctttaatatcctctacttctttcgtataaatgcttaaaatatcgtctttacgtgccattggtatcaacccttcctttttcttatttattaatcattaacatgcgcccagtctaagatgacttttccggacattccggaaatcattgcctcaaagcctttttcgtagtctttaatatcaaagcggtgcgtgatgatatcagaaatatcaagccctgcctgaagcattgtagacatcttgtaccaggtatcccaaacctttcttccatagattcctctaaggttcagtccgttaaagattactgtctcaaggtctaccgtagcatctgttctctgaagtcccagaagagcgatctttccgccgtgcttcatattatgaatcatatcggcaagtcctgcctgagatccggacatttcaagtcctacgtcaaatccttctgtcatgccgatctctttcataacatcagccagtttctcttccttaagattaacggttctggttgcgcccaatttctttgcaagatccagacgatagtcgttcaggtctgtcacaacaacatgtcttgctccggagaactttacgattgccgctgccatgataccgatcgggcctgctcccgcgatcaggacatcctcgcccagaacttcataagagagggctgtatgcgtagcatttccaaatggatcaaagattgcatacatctcttccggaattgccgggttgcatggccatacattggaggaaggaattacaagatactcggcaaatgctccgtttctgttaacgcccacgccttttgcatccttacagttttccttatgcccttccagacagttcctgcacttgccgcaagtaatatggccttcgccggataccagatccccaatcttaaatccctgtacgccgtctcctacttccacgatctctccaacgtactcatgtcctgcagtaaggccaatcggaattgtatgctgtgcccaatcattccactggtaaatatgtacatctgttccacaaatcgcggttttgtgaatcttaatcttaacatcattcggcccaacttctggaattgggactctcttcatccataagccttcttccggcttttcttttacgagtgcccacatcattccatcattcttaatttctaccatgattaaaacctcccaatttttttcgtctaccccagacgattcttttcgtgttaattatagcaccccttttctccatatacaatgacggattctaaatttccttgtacaatactccctattttttgcataatcgcccattttttcatgttattaatttacaaaaaaagtttgttaaattttaatttatgtagcattattcacaagtttatgagataatagttttacgttggggaaaacgaaactaaaaagaaagagaggaaagcagatatataagcgtcaatatatctgcgaaatgagagaaatgaaaaacatcatcacaaaatggaacagcatcagtcttgttaaacgaatcatttgcggcttgataatcggtctgattctaggtcttgttgttccacaggctacacctattgctatgctgggtcaattattcgtaggagcattgaaggcgattgctccaatccttgtattcttccttgttatgagtgcgctttgtaaccagggaaaaggacagaagacaaatatgaaaactgtaattgtcctctatctgttaggtacattccttgccggctgcgttgcagttgctgccagttacttattcccgattacgcttacactcacagacagtgtggaggatatgaccgcacctggcggtatcggcgaagttttaagcaaccttctgcttaacattgtagcaaatccggttggttcaatcgtagaagcaaactatatcggtatactagcatgggcggttatctttggccttgctcttaaaaaggcaagcgatggcactaagaaagcattggaaaacatctctgatgcggtatcacaggccgttagatgggtcatcaactgtgctccattcggaattatgggcctgatcttcaatacgatctccgagcagggactcagcgttctgcttggctacggaagactgatcctcgtaatcgtaggaagcgtattcttcgtagcattggttgttaacccaatcatcgtattcatctgctaccgcaagaatccatatccattggttttgaaatgtctcaaggacagcggtattactgcattctttacacgtagttccgcagccaacattccggttaacatgaagctctgcgaagagttaggactggacgaagatacatattctatttcaatccctctgggagctaccattaacatgggtggtgcagccatcacgatttccgtactcgcacttgccgcagcacatacgcttgaaatttccgttgatatcccaaccgctatcattctgtgtatagtatcagcagccagcgcatgtggagcatctggtgtagccggcggatcactgcttctggtacctcttgcatgtagtttattcggtatcccgaacgacgttgcaatgcaggttgtaggcgtaggcttcatcatcggcgttatccaggattcctgcgagacagccctgaactcctctacagacgtgctttatacagcatctgcagaacttctggacagaagaaaatacccagacagatatgttggtcgtgagttaaatcctaaaatctaatatttaatacaatataaaaaggccactgcgtaatataaacccagttacgcagtggcctttttattgatatatgtcttatttatcctaaataggcaatcgcttcttcccgggtcatccagacgtgtattccgcccccggaatctacaaagcggtccgggttaaagttctttgcatataccatctcgcctgcccgatacacaaagttctcatccacgtaggcgtgggcatcttcgtaattctctttgtaatccacgctcttgatggtaagcacctttgccttgtcgcaccgcacctcgttggtggttccggatactcgctttgcatctcttggtatcagcagttgcacgatccgtctgccataacacaccttccacccaatgaatggctccgtctccgggcagtaaagatgaaaatattttgtattttcatccgtctttatatccgtaagatctgcccgctccagagccgatgccagcatattcgcacccctgatatctgcgccggccatattgcatccccgcaggtcagcagagtgcagatctgctccagaaaggttcgtacccctaaaggtcgagcctccgaaaaacgcgttgtcagccttaatataagccatattcgctccatccagattcacattacggatatcgcttttattaaagttgatgttgtgaagatcccagcctgataaatccatgtcctccagcagaatgccgtgcagatccagttgctctgccgtcttccggttcctaattttctcttctagttcttcccgtgtcaattttcgaagcatgcccctctccctctcatatacgaataatctatggtatattatattccttttttatcttctttgcaatcaggcctccttctttttctaactggcatcttccctccctctacgcgcccgcttttggccagcgcttttcttataaatgcctttttatcctttaatttatccaaacttgctagcctccactcccagttaggcgttcctagcgtgcccggagtattgagcctccccgcattatcaagttccagcacgtcctgtactgggagtatcgcagtatccgccttattgtccagcgtatagcagataaagtttttcaccaaggaatcttcctcatacccccatgcatataattctctttccgttgccaatctgacctctcggggctgtccttcaaaccatccttttatagtctcattatcatgtgttcctgtatagacgatcatattttccctatcctcaaacagattgttatgttccataggatcgaaagtaaactgaataatcttcatgcccggcagatgatatgcgtccctgagttcatatacctgcgggcgcatatctccaaggtcttccgctacaatcctgacatccggattgtctttcaaaagtacgtcaagcaaagcgttgcccggcgcctcgatccattctccttctctcgcggtaggagaagacgccggaatcttccagtaggtatcgaatgcccggaaatggtcaatgcggatgatatcaaacagtcttgcattatagccaaaccgctttctccagaagacaaatccattctccttcatacgctcccagttatagattggattgccccagcgctgcccgtctttactaaaataatccggaggaactcctgcgataaacgtcggttttccatctgctccaagcaggaattcatcctgattcatccaaacgtccagagaatccaatccaacataaaatggtatgtcgcccattatttctatcttattgacatttgcatagtttttaagggccttccactgcctgtagaattcatactggacaaacatctcaaagcaaatttccgcctcatagatgctgatatcgaacgctcggtcttttatccaatttttgtgttcttccttccattcattccagcatttcatgccattgtgtcttttaagagtcaggaataccgcatagggatatacccattcctgcttcttaaacgtctcatattcagaatccgggctgaaattccggaaggcttcctgcaaatatttccgcttatatgctcgcactttttcataatccaccctcgcctcttctctgcgaaatggagcaggcttcctgtttaaaagtccttcttccgacaatgcatccagatccagatagatttcatctcccgcaaaggaagaatacggctgataaggcgaattaccatatcccaaaggattcattgggagaatctgccagatgtgcagcccgcactccttcataatatcaatgaattccctgcttccccttccaaaatctccaacgccataatccgatggcagtgcagagaccggcatcaataaccctgcttttctcatgttgctactccttgtccgctattcctgatccttttcatccgcctgtacatctttccgttcccagaatagcctttataccttttaaaatgcctctacaggctcttagatatagtatgccgccttcattgtatagagatgcaaaaatcagcccgaaatcacattaagcccacaaaaggcagaaatcccttcttttgcggaaggacttctgcctttttctttattcgttgcctttatcgaaccgtatcggacagcggcattttcttcttaccactcaaacttctttgcaaaataagcatccaggtcttcgatcttgattctctcctgctccatggtatccctgtcgcgtacggtaactgctccgtcttcttcagactcaaagtcataagttacgcagaatggcgttccaatctcatcctgacggcggtaacgcttgccgatatttccacggtcatcaaattcgcagttgtacttcttgcttaactgggcatacactttctctgcgccctcattgagcttcttagacagcggaagcacgccgatcttgattggcgcaagcgccgggtggaaatgaaggacggttcttacatccccgccttccagttcttcctcgtcgtatgcactgcacaggaatgcaagcaccatacggtctgctccaagtgaaggctcaataacgtaaggaacatatttggccttcttctcgtcatcaaagtaagacatatcctgcttggaggtattctgatgctgggtcaggtcaaagtctgtcctgtcggcgatgccccacaattctccccatccgaatggaaacaggaattccacatcagtggttgccttgctgtaatggcttaattcctcaggcgagtggtcacgatagcgtacctcatcatccttaagccccaaagtctccagccagttaaggcagaaactcttccaatagttgaaccactcaaggtctgttccaggctcgcagaagaattccagttccatctgctcaaactctctggtacggaaagtaaagtttccaggcgtaatctcgttgcggaaggacttaccgatctggcagataccgaatggaatcttctttcttgacgtacgctgcacattcttaaagtttacgaaaatgccctgggcagtctcaggcctaagatacactacactctttgcatcctctgtaacgccctggaaggtcttgaacatcagattaaactcgcggatctcggtaaagttatgcttaccgcaggacggacatggaacctcatgctcttttatataggcttccatctgctcgtggctccatccgtcaatgctgtctgcgatatccagtccattcgcatgcgcatactcttcaatcatcttgtctgcacgaaaacgctcatggcattctttgcagtccatcagaggatcgctgaatcctcccagatgcccgctggctacccatgtctgcggattcatcagtatcgcgcagtccacgccaacattatacggggattcctgaacgaacttctgccaccatgccctctttacattgttcttcaattctacgccgagatttccatagtcccatgtattagcaagcccgccgtaaatctcagatccagggtatacgaatcctcttgatttcgccaatgctacgatcttatccattgtcttttctaccatatcctcttcctcgccttctatagtttcataattgttaattattatacagttaaccacaggggttttcaagtcttattccacaattgtttccagtatttccaaggatttgaagtgcctgtccacataaacgtccagatacgcgcgcaccaccttgcccagttcctctaatatttcctcttttaccgtaaatgtatataatttttcaatattggaactgatgatatactgcattgcatacagcgttgacgtcttaagcaccataccgtccgtaatcctgcccgagcaggcgctgcataccagcccgcccttacggacgctgaacaaggccgggcgctccctatcaccgcagcagatgcatttaaacacctgtggcgcctcgccgttaattgccaccgccttcagttcatatatgtaccggaccagacggttatccaaatgcggattggtcagagcccgaagcgtctggtacagcagtttcagcagctgggtctcatcgttatactctctggcataataatcggcaaattccagaaagtaaaatccataataagccccctccacatctatcctcaattccgaaaaataattggtaacagaggccgacaccagcgtaaaagatgtccgcccctcatataccataaattctccgaaagtaaaagggctagtcacgcctacaagcgagctgttgggccgcctggcccctctggcaaaggcagttatcttgcccctttccttcgtcaggattacaacccgcctgtcatattcacctataggtgatgctttcagcaccatccccgtcacggtaacctgattcattgtctattccacctgtctgtcctgcattatccgcctcccggcgctctattacctgccggcagatgtccattcctctgtaataaagatagtctgtcacactgccagtctttgtaaaactttcccagtatctgtcttccatagaatcacctcatcctccgttgataagtttagggtctcccatggaagcctttttttattcgtcttcccgatatccaaaatttttcatcagatattcactgtcccgccagtccttctttacctttacccaaagtttcagatttacctggcgatccagcattttctcgatctcgtacctggcggtgctgccgatctttttcaacatatttccttgtttaccaataattatccccttgtgggaatcgcgctcgcagataatcgtggcgtcgatatgcatgaccttatttttcatcttcatactgtcaattgccacggcaatcccgtgagggatctcttcctgcagggaatgcagcgctttctcccgaattagttctgccacgatctggcgctccggctggtcggtaatagtatcttcatcatagaactgcggaccgtaggggagatatttcatcaccgccttaagcagttcctcggtattattcccgttcctcgcagacaccgggacaatctcggcaaaatcgtagatatccttgtatgtcgcgatagccggcagaatctcttctttctttacgctgtcaatcttattgatgaccagaatgaccggggtgctgactttcttaagctgctccgcaatatgcttttcccctgcgcctatgaatgtggtaggctccaccagccacaataccacatccacctcgttcagagtacgttccgccacatttaccatgtattcccccagtttattcttggccttatggatccccggcgtgtccacgaacacaatctgcccttcctccgtagtcagtaccgtctggatacggtttcgggtggtctggggcttattggacgtgatggcgatcttctggccgatcagatagttcataagtgtagacttgcctacgtttggtcggccgatcaatgtcacaaatcctgatttaaaatccttcttcatatgttctcctttaatttaacacgtaacatttttcacttttgcacgtaacatttttcaaaagtgttacgtgcaaaagtgaaaaatgttacgcgtcccgttaaaaacttgtcacagttccaaataggtttctttcttcctcgattttttcttcgctgccgattacgcacagctggtctgcctttaacactgcctctaccaccttggaaagcctgcggatatcgtcctgtcctgcctccaggatctctctcctttccttctggatcatctcggcgctgactttgttcatatacaggttcatagaacggtctcctttggctgcgggcgtcatcggctgatcaatgttgctcatagtgccaatgatatatttcgtcatatcgcgctcgctgacggtaaattctttcaggtattcaacgattccgtcatatacttccagggtacgtctgagattcggatcacggtaggatacgaaatacccttccccgatgcggttaaaattgctcatgcagccgtatgcgccgccttttacgcggatattctgccacaggtactcataacttaagatgacctttaatatctgcagagcgcccgtataggatgcgccattgtcaataaaattaccggtcctcgctacatactggactttcgacgccgtcttgaacccttcattctttttctgacagtggatcatgcatggagaatcctttggctcttcatgattcaggcttgccttcatggatgatatcatcgtctccatatcctgaagcccttcttttgcagccgtatagctaagcatcatattgtccgcccggaacaattgtcttgccaggctcttaagattctcaaccagcctgcctttctcttcttcaaaatgttcttcgatataggcaatcttctcataaaattcgattccattggtcatatcttttaacttggccgatggggacgaataagacatcgcccttaacgccgcagtcgtatgtccggacgactggaacttcattaaaagcctggatttaagcatcgccagaatctctttcagacgcttctcatcctccagtttcgactgggttagaatctccgccatcatgtcaaatgccaccgggagtttggcatacagcgcctttgccttgatttcaaaggtggccctaaaggccttctccctcacgttcgtcacatccgaataaagttctaaagatgtgccaatgccgcctgtatgcatattgatctcattaaacaatgctccatattcaaaatgttctgtatcgatgattccgagcacagactgcaggatgcctacataggaaagcatctcttctgtcactcccgacagatcaaacatcacatccacatatccgattccattggtctctatctcatggaagactactggaacccccgaaatattcatctcctcattaatgatcggttcgatatccctggaaatatcttctcttttaagaattggaatcttcgccaggtcttcttcatcatccggcgcagactggtatgcttccagcgctttggtgcgctccaccagcacttcctgctccctcgccgagaggctgttcttgtaagcttgcagcttctcctccatttctctgtccctctgagctgtacggcccttctccggctttacgatcacgatggcgccatgggtgttgtctaaaagatatttctggagcaattcttcataatatccggttccaatctgcttcttcaggaattcaaacgtatccagcgcctcgatatggatgaacggcttctcatcatcatagagccagctgtccatcatctgaaggccatacatcagcccttttggataatttccaaaatccgcctcccggtaacggaattcatggtaattaattcctgcttccaacgctttctgatcgatccctttatctgcacactctctgagtacatcttcaatcacctgaataaaagcctttttctgctcctggttcgcgtttttagatacgatggaaaaaataggctggtagatcccattgtcataggaccccataatatcctttccgatccccgcatctgtcagcgctttcttaagcggcgctcctggcgcggacagtaatgcatagtccagaatctggaatgccagatacaattctttatccagactggtgccgattaccttattgtaggaaagataggtgttatcctcctcagattcatcgcttgctatggaatatggaatctccttctccacaattttagcaaaaggatcctggtactttatctctgaatctaccgatacaaagtcaaatttgcttaaatactctttatccagccaatacagtttttcctccatatccatatcaccatacagataaatataactgttggatggatggtaatattttctgtggaaatcaagaaactgctcataggtcagttctggtattacttccggatccccgcccgattcattggcgtaagaagtatccgggaagagtgtattaagaaccacccggtccagcacgccttctggcgatgagaaggcccccttcatctcattatagaccacgccgttatatttaagcttatcttccaccgaatccagttgataactccatccctcctggcggaagatctcctcatgcttgtaaatattaggataaagcaccgcatccatataaacgtgcatcaggttctggaaatctttatcattacagcttgccaccgggtacaccgtcttatccggataggtcatggcattgagaaatgtattcagagatcctttcaccatttctacaaatggatctttggccggaaaattcctggaaccacacaggacggagtgctccataatatgcggcacgcctgtgctgtcctgcggcggcgtcctgaagcctatgctgaacaccttgttatcatcatctttttctaccagcaggattctcgccccgcttttcttatgtctgagaaggcatccctttgctttgataccctttaagtcctcttcttttaatacttgataagcatttaagtctttgacacccataaagcttcttctatctcctttcatcgcgctcatttctaacaattataacaccttttcgcacatggttgaaggcgcaacatttattttctcctgattccacggctttactttctatatcatgtctttcttcggatttattattctttttcactgtattagaaaaaggcccgtcttgcgggccttctctacgacttttatataacgtctctatctctttgctatgttctctttattccttgcctattgtattcttaatcaccagcagtgtagccaccatcaaggcaattcctatcggaagacaaatgaatggattctgaacgaatcccgcaatcacataggttacgaaggaaaccgccgctaccgttattgcataaggcagctgggtcgtcacatggttgacatggttgcactgtgctccggcagaggccataatcgtagtgtcagagattggcgagcagtggtctccgcagactgcgcctgccatgcaagcggagatggatatgatcatcatcctttcgttggttccagcaaatacggcaacaacgatcggaatcaggatgccaaacgtcccccaggatgtgcctgttgcaaatgccaggaagcatcctaccaggaaaatgatggctggaagcagattcacaaatccgctggcagcagaatccattactcccgccacgtattttgcggcgccaaggctgtctgtcatggcctttaacgtccatgcaaatgtcaggatcaggattgcaggtaccatggccttaaatccttccggcacgcaagacatggattcactgaatctcagtacttttcttgccgcatagaagataatcgtaatgataaatgcgaagaaacttccaagcataaggccaacggatgcatcgctgttagagaaagattctacaaatcctgaacccgagaaaaatcctcctgtatagatcattccgattacgcagcagatgatcagggcaataatcggaagtaccagatctattacctttcctccggtctcatctataacttcctctgccgtggcatacggcctgtccggcgtggtatacagatctcccttcaccgcattatcctcatgaagcttcatcggcccataattgatgttcaagcatacaatgacaaccatcatgacgatcgtcagcagcgcataatagttataagggattgcacggataaatatggagaatccatcttctccttccacaaagcccgtaactgctgccgcccaggatgaaatcggtgcaatgatgcacacaggggctgccgtagcatcgataagataagacagtttggcgcgggacacattatgcttatccgttaccggccgcataacgcttcctacggttagacagttaaaataatcatcaataaaaatcagcacgccaagaacgatggttgccagctgagcacctacacggctcttgatgtgcgtgcttgcccagcgtccaaatgctgcagatccgcccgccttattcatcatgcagaccataattccaagaaccaccaggaacaccaggattcctacgttataactgtcagacagcacgcctacgatcccgtcctggaatacatgcgtaatcgtcttctcaaacgtaaatcctgaatagaatatacctcctatcagaatacccacaaacaatgaactgtagacttccttcgtgattaatgccagcacaatggcaacaatcggcggaaccagcgcccagaaggaagcatacatctttgggacatattcggccgcttcatcagccgcaaataccgtcattgtactgcaggcaagaatgcaaagaagtgccagaatcccccataccgcttttttctttcctctcatcgtaaaatttcctctcttttcctttgaatataaaaatgccatgaacaacgctaatccgggcgcgctcatggcataatcttcaatctacctaaaatcttgtattatactctgatagcgctccactgttgtgacagtccgcagcatcttatgcatacgtcccagaacatgcatacgggccatgcacatccttcggcggcctcccctttcctctaaagcagccgcccgggctatggcttttgagtactgatgaaatccgcgcctctatcaagtccattattcatatagtacatttgtatcatttttctatggaattgtcaataaatgatagatttttagcaaagtttatcccgattattcataaagaaaattcatatattcatatatttccccaaaatcaactttgcactccccctcaaaaatcccaaccggcaccttgtcctccccgccgtaaataaccgggtattcctcgtgcgcaaagtcgtacacgactacctttctgctctccggatccaccatccaatattctctgactcctgcattcatatatttattaagttttaaaattgaatccttcttcctggtcgtcttggacataatctcaacaataaagtccggcgcgccatatacgcagttcatatgaattctttcgcgatcgcagaccacaagtacatccggctgtaccatcgtcctgtcatcgcagtcaagctgtacatccagcggagccagcattggcacgcactttcccttgctgttccggatataggacttcagctgttcccatatctctgctcctatcagctggtgcacggaagtaggagatgacatatcatagatgattccatcaatcagttccgcccttctgtcctccggtaatgcgtaatagtcctctatgatataattcccctgctgccttgcccggtacatcgctgccgcctcttcaatcctgtctccttcctgacttttaaatgccttttccagcgcctgaagcgtatcatatcggggtgattccgttacgcctgagaatatcttctgtacagtaccaagaggcactccagaaagttcagcaatcttgtcatatgtatatcccagcattcttttttgccttttcatctcttccacagtcatcggcattctctccttctctaagcaataatcaccattttctttccattattataccactaattctccatttactcaacatttcactccaattaatattttttctatttcatcagctcaaaaacaaccaaattttttccatttttcaacacttaatgcctgagcctcaaaaggctcaataacagccaaaaaaatcccgcctccggtactataccggaggcgggagcctttaatcatattatacttttacaataccgaacgattcttattcttctccgtaaagagtgaccagtttcttcaggtatgcatatctctctttcgcctcagcttcattcttagcgaagagtttctctgccttctcaggatttgctctcttcagggcgttgtaacggacttcgccgtcaaggaatgcctgataatctcctgttggctccttgctgtcaagcgtgaacttagcgccttcagctgctggattgaatctgaaattattccagtatccgcactcaacagctaatgcttcctctgtctgagccttgctcatgcccttcttgataccatggttgatacatggagcgtaagcaatgatcagtgatggtcctggataagcctctgcctcggcaattgctttaacagtctggttaaagtctgcacccatagcgatctgtgctacgtatacatagccataactcattgcgatgcctgcaaggtctttcttcttcgtctcttttcctccagctgcaaactgtgctgttgcacctgtctttgtagccttggaagactgtccgccggtattggagtaaacttctgtatcgaataccattacgttgatgtcttcgccgctggctaatacatggtcaacaccgccgaatccgatgtcgtaagcccatccgtctccgccgaatacccactgggatttcttagcaaggaagtctttattcttaacaatgtctttgcatgtctcgcaattgcatccttccaatgctgctaccagcttgtctgaagcatctccgttagaagcgccgcagttaaatgtatccagatattcctggcaggctgccttaacttctgctgatgcctctgcagatgctgcaacagtttcaacttcttctttcagtctctttctgattgccttctgagcaagcagcataccatagccaaactctgcattgtcttcgaacaaagagttagaccaagccgggccctgtcccttgacgtttactgtgtatggcgtagacggtgaagagttaccccagatagaagagcatcctgtcgcattggcaatgtacattctatcaccgaataactgagttaccagtttagcgtatggcgtctcgccgcatcctgcacaagctccggagaactcaaggagtggctgtttgaactggcttccctttactgtctctggcttaaacttagcaacaacttctggcttaacttcaatctctctgccgaaatcaaagatatcctgagaagcaacatttgcttccatattccccataacaagcgccttctcgcccttcttgcctgggcagacatttgcacaagatccacatcctgtacagtcataagctgatacagtgattgcgaatttcattcctggcatgccaatcatatcgattgtctttgttccttccggagccttagccagttcttcttctgtaagcgctacaggacggattactgcgtgcgggcatacataagaacagcggttacactggatacagttttcttctttccataccggaatatcaactgcgatgccacgcttctcatatgcggaagagcctgatggagtagatccatctacataatccttgaatgctgatactggaagcgtatttccttcctgagcattaaccttagcctggatattcttaacgaaatcgacaacatcttctcttccacccttaacttctggtgagaacagtccttcgtcttcgcatgatttccaagaatctggaacctgaacttcaacaacctgcttagcgcctgcgtcgatagcgtcatagttcatctgtacgatcttatctccctttcttccgtaagtagccttagctgcttttttcataaggtcgattgcttcttcttccggaatgatggacgccagtttgaagaatgctgactgaagtaccgtattgatacgtccgccaagtccgatctctttaccgatcttgataccatcgatcgtatagaacttgatgttgtgatccgcgataaatgcctttacctgtcctggcagatgcttatcaagaccttccatatcccatgggcagttcagaaggaatgttcctccgtctaccagttcctgtaccatattgtacttgtttacataagaaggattatggcatgcaacaaagtttgctttatggatcaaatatgttgatttgatcggtttcttaccaaaacgcaggtgagacattgtaacaccgcctgacttcttggagtcatagtcaaagtaagcttgtgcatacatatcagtgttgtcaccaatgatcttgatagagttcttattcgcgccaacagtaccatctgctccaagtccccagaacttgcagttgatcgttccttctggagtcgtaataagcggagcgccgatttcaagagaaagatttgtcacgtcatcttcgataccgatcgtgaatctagccttctgtgcgttattaaatactgcaacgatctgtgcaggcgtcgtatctttggatcctaatccataacgtccggaatatacaggaacagcatcaaactttgttccctttaatgcagaaacaacgtcaaggtataatggctctccctgtgctcctggctcttttgtcctgtcaagaacattaattgtcttaaccgtctctgggatcgcatcaatcaatgcctgtgcgcagaatggtctgtacaggcgaactttaacaacgcctactttttctccagctgctgccaggtaatcgatcgtctcctcgattgtatcgcatacagaacccatagcaatgataaccttctctgcgtccggtgctccgtagtagttaaacagtttgtaattcgttccgatcttagcgttaaccttgtccatgtattcctgtacgatagccggcagtgcatcgtaatatgggttacatgcttctcttgcctggaagaagatatccgggttctgtgcagaacctctctggcatggatgatttggattcaatgcatgatttctaaattcatctactgcatccatatcaaccaggtctttcagatcttcataatcccatgtctcaatcttctggatctcatgagatgtacggaatccatcaaagaagttgatgaaaggaagttttccttttaatgccgcgcaatgtgcaactggcgtcaggtccataacttcctgtacgcttgattcgcaaagcattgctgctccagtctgacgacaggcatatacgtcggagtggtctccgaaaattgacagcgcgtggcttgcaagggcacgtgctgatacgtggaatacacccggcagctgttcgcctgctactttatataagttaggaatcatcaacagtaatccctgagatgccgtaaatgtcgttgtaagagcacctgctgccagcgaaccatgtaccgctccggctgcacctgcttctgattgcatctctgtcacctgaacagtttgtccaaatatgttttttctaccttcggtagcccactcatccacgtgttctggcataacagatgatggggtgattgggtaaatagctgcaacttcggtatatgcatatgatgcgtgagctgctgcctgattaccatccatggtcttcatttttcttgccatttttgttgttcctccttaaaatatgatacaaatcattatttgacgtgtgtaattattatagtccctaaccccttaaaagtctagtgattcttggctttattttgttcctttttccatacatctgcttctttcaagaccgcctggctgccccctgggataccgtattttcttgacaaaaatatatctgtcggttatactgtaaaagaggattgaattaagcgaggatgctctcacaaaacttgtgagcgcatccttttttaattcattgcatctcaaatactatagagattggggtgtttttatgagtagtaatgaaacaggtactggaaaaagtacaaaagagcatgcacagtgggggtcgcgtttcgggtacatcatggtagccgcaggagctgctatcggacttggtaacatctggcgttttccatatcttgcgtatggcggcggcgggggcgtattcatcgtcatttacatcatcatggctgcccttatggggtatccgctgatcaaggcagagagtgccatcggacgttttgcaagagccaatgtagccgcttcttttggcgcagtaaagaaaaagtaccgatttgtgggctggatcgccattctttgtacgactttaatcgatatgtactatgtcatcgtcggaggatgggttctgaagtatgcagtagcctacatcatcggggaagatttcggctccgacacgcaggttttttttgacggatttaccgcatccagcgtccagccgctggtctatacggcaatcgttatgatcgtagttgctgtcctattgttctttggcatcaccaacctggtagaaaaagttaccaaagttatgatgcctgccttgttccttctgctggttgtatgcggcatatgggccattttctccacgcctaacgctgtcgaaggcctgaagtattacatcgtaccggattttagcaaaatgagcgtaaaggtattcgctgatgctgccacgcaggtattgttctccatcggtattggctggggaatcttcgtaactctgggcgcaagccttccaaaggaaaataatatcaaaaaagactctgtttggattgcagtctgcgacacggtggttgcattgactgcaggtttcgttatcattccttccgcctatggcgcaggtgtagatatggccagcgggccttccctgatcttcgtggttatgacccagatattctccaaacttccgggcggacggtttatcggcatcttcttcttcatagcattgctgtttgcagcgctctccacattgtttacgatcatcgagatcccaaacaagtggctggaagagtccacgcatatgtctcaccggaaatcaacgacgatcacctccctcatcatcttcgcaggcggtatcatcgtatcccttgggtttggagttctgagcaatgtccagcttccatttctggatgtacatggagtggcatactacaatatctataactggctggataccttcaccgcttacattcttctgcctctcggctgcctgcttacctgcttctatgtggcaaaggtatggggatttaaagatttcgagaaggaacttaccgtgaatggaagagacggaaagttctcccagttccagaaagtggtatacgcagttatcgtaccggcgctgatgctggtagtaattttgaactgcttcggatttattaactaaagcaaaagatcatttataagggcgtcccgggaacgacatattcgttatccggggcgccttctctattgttattatctaatgaatcccgactgcttatcctaaataaacgacttcctcttgaggcttttgcgcgggttccattcctatcaggtgcagcaccggctgctcatttccaaaagataccgctgcctcccattcaaaccttgcccgcaggcgaatccattcatttttcttgaactcgatcttctcatcggatttgcagggatatccataaaatcggatgtcagcggcgcagcaagtcatgatcttgcggaccgggacaaacatcttctcatccatgcccctgggcctgaacgcctgggcagtaaactcaatctctttatggagatacagttccggatgatcatatgcatccacgtaccagatgccaaaatcaccatcctccacaacaatcttgtctccttttacatcataaggcaggtcctctgccgatggctggataatctttccatccattccctcaaagataagctgggccataggattctgcacctttaaagcccgtctgaatccggaacggtctaccccgtccggacagcggtttactacgatcaattccgattccgccagctgctccatcagcatattacgcatattggccagatacatgtccagcgttgtcccatctacggtagagtacaccccctgcagttcccaattgcgaggatatttgatggacagcagatcctccagtttccacattccattatattctatgacaacctgagtcggatgataattcttctcacagttcttaaaaaacacagaattcaactgttcaaatgcttccacctttagctgggccatctccttgctgtccagatattccttggagtattcttcctccccttcttcacacaatatcagcagtgtgagtcctggctcgatccagtcctgctccattagcgtctccttcaccagagtagtcttgccgctgtccagaaagcctgtacacacaaacaccggtgttaccatgtcgtctccctcctttcccctattccttcttacttcaaatggaacaaggtcataagttcctcttctttcagatccgttccgattacgcagagacgtcccgtatagtctggctgtccttctctcacctcatactcctgcggcacaagatcaaactgcctccaagagccgtctgacatttggataattccttttgaccgaagcactgttccataggcctctgtctccgataatgccttcagcatgaagtccagttcctcctttgtgtacttatgcgccgtctcttttccccagctggtaaatatctcgtccgcatggtgatggtgatgctcatggccgcacgcttcatgctcatggtggtgatgctcatgatggcagcattcttgcccatgcgtctcttccagcagtcctgccagctcgcttcccttctccagagcatgtatgatcgcttccttgcccagctgcgcccagggcgtagagatgatggctgcctccttattctcatcccgcagcatatgaacgcattcctcaatcttatcatcgctcatggcctgcgtacggctgataacgatggcagaggcatgctccacctgatctttgaagaattctccgaagttcttcaggtataacttggccttctttccgtctacaaccgtaattcttccatcaatcgcaatatccgcatctttttttacatcttctatggccttcatgatgtcggataatttcccgactcctgagggctctataatcacgcggtcaggctggtactcctccagtacttttttaagggccttgctgaaatccccaaccagcgtacagcagatacatccggagttcatctctgtaatctcaattcctgcattttttaaaaaaccgccgtcaatgccaatctcgccgaactcattttcaatcagcaccagtttttctcctgcgaatgcctgattgatcagctgcttgataaatgtggtttttcccgctcccaaaaagccggaaataatatctactttcgtcatccttattgcctcttttctatttccattcattgattgatatacacatccgacacatatattaccacaaactctcccaagtttccagttatacccagtcaaactataacggcagtattcccagttctccactgaaaatactgccgtttgcatgaatgattatttttctcttacagcacgccgcctattgataagaacaatggtgcaaataccagtgatacgatcgtcatcaacttgatcagaatattgatggatgggccagaagtatccttaaatggatcacctaccgtatctcctacaaccgccgcatggtgcgcgtcgctgcctttgccgccatggttgccgtcttcaataaacttcttggcattatcccatgcgccgcccgcgttagacatgaagatcgccatcattacgccggtaaccagcgcgccggccagaagtccacccagggccgcaggccctaacaaaattcctactatcagcggcgcaagcactgccatgattccaggaaccagcatctctttcaatgccgcggtggtggagattgcgacgcaggacttataatccggctttgttgtcccttccataatgccaggcatagtcttaaactggcgtcttacttcctcgatcatctgataagccgccttggacactgactgcatcgtcatggcagaaaacaggaacggaagcatgccgccgataaacaggccgatgataaccctgctgttaaggatgtcgatattcttaagctgcacagcctctgcataagatacgaaaagcgccaaagccgtaagtgcggccgatccaatggcaaatcctttgcccattgccgccgtcgtatttccaactgcgtccagcttatccgtaatcttgcggacttccggctcaagcccggacatctccgcaataccgcctgcattgtctgcaattggtccataagcgtcaaccgctaccgtaatggctgtcgtagacagcattcctacggctgccagagcaatgccatacaggccgcagaactgatatgccacaaagatgccggcgcagatcaaaagaatcgggatcgcagttgacctcatgcccaccgcgaggccgctgataatcgtcgttgcagcgccagtctcggactgttctgctatctcttttacagacttatagtctcctgatgtatagacttcggtaatgattccaatcagcaggccgacaataaggccagccacgatcgcgatagccgcattgaaatccccgaagaaatatttactgaatacaaatgctacgatcagtacgatcacgctggatgcataagatcccattttaagcgctttgtgcggattggccttctcatcgccttttacgaagaaggttccaagaatggatgccagaagcccgcatcctgcgatcatcaatggaaaaacggcgcctgccactttaaaatatacgattcccaaagtcagcgaagatataagcgctcccacataggactcgaaaagatccgcgcccattccggcaacatcgcctacattgtcgcctacgttatcagcgataacggctgggttgcgaggatcatcttcgggaatgcccgcttctacttttcccacaagatccgcgcccacatcagccgctttggtatagataccgccgccaacacgcgcaaataaagcgatagatgaagctccaaggctgaatcctgacaatacgtccacattcttagtgatcatatagatggcgctcactccaagaacgccaaggcctgccacgcacattcccattactgccccgccggaaaatgcgattgagagcgctttgttcattccgccttctttggcagcatttgcagtcctgacatttgcttttgtagcaaccgtcattccgaaatatcctgccagagtagagaataatgctcccacaacaaagcaaatggcagttacccagttgccaatgccaaagccgataagtacgaataatacgatgacaaagaatataagaatcttatactctgccgtcaagaaggcctgggcgccttcgccgattgcagctgcaatctccttcatcttgtctgttcctgcgttttgcctgctcacccttgctgccagcagggccgcgaacagcagggctgcaatgcccagcaccggaacaatgtttaaaaacatctccataattaaaatcctcccacagatttattataattcttatattatcataaaaatgcggattgtatagtgtttttttcagattctatcagaattcccaatttttttgcactttccttccagtatatttatttatacccctttgattcgcttcatgacccatcatactctatgcaaaccagcgtaagcccttccggaggcgccgtcactccagcctgcgtacgctccctggcttccaggatttccttcacctttgtcggctcatagaaccctcttcccacccgtatcaaagtgcccgcgataatccgaaccatattatagaggaatccattccctgtaatccgaatggtaatatccggcccttcctgctcgatcattaattccttcactgtccgaaccgtatcttccacactagtccgtacattacagaaactgacgaaatcatgttcgcccagaagataagccgctccttccctcatcttctctacattcataggaaatgatacaaaagcgctgtatctgcgctttaaagggttttgtaccggtgcgttataaatatggtattcatacgtcttaaggatctcatcctgatatctgggatgccagtccaatggaacttcctttgaacttacaatcacaatatcatctggaagccgctggttcagggcataagccatccgctccgccggaatggaagactccgtatcaaatacagccacattgcctaatgcatgcaccccggaatcggtccggctggctccgatcacatgaatgtcttctccagtcagtttctttaactttttattcaatacctcttcaaccgtaattccattaggctgaatctgccagccgcagtaatctgtgccatcataggctatggtcagtttaattcttttcaaaaggcaccgcgtcctccttatccatgttacgtcctgtcatcagaatatccaaagatgcagcggcacgtaccttccaataaagaataccgccaccacatatgccacgaccacgatatatgccatacgatctcttgactggtacttcagaggcttcatcttggtccttccctcgcctccgcggtaacatcttgcctccatagccattgcaaggtcattggcgcgccggaaggccgatacgaacaaaggaaccaggatagggatcatatttttagcccgctgaataatattgccactctccaagtcagcgccccgggcaatctgcgccttcatgatcttatctgtctcttccagaagtatgggaataaatcgcagcgcgatagacatcatcatcgccacctcgtgcacaggaacgcgaatcttgttcaatgggtgcagcagtttctctattccatccgtcagttcattcggcgttgtagtaaatgtcataagcgaagagccaatgatcagatagatcagccggatcgccatatagacagccgttcgaagccctccttctgtaatggtgaagatccatgcatggaacagcacctcgccgtccctggtcagaaacagattaaataataccgttatcatcagcagcatgacaatgggcttgaggcccttgacaatgtaggaaaacggtacttttgaaagccgtatgacggctaccaggaatacagtcgccacgatatagccgggtatgcttttaaacagaaacaaagagatcagatacagaagcgtggataccagtttcacccttggatccagcctgtgcagcacgctctttgccggataatattgtccgattgtaatgtctcgaatcattcttttctctccagtgcctgcatgatttctctggctgcttcctccaccgtggttacgtccaccttcacaggaagcccatgctccttaagatcatgcatgatatatgtgacctgcggcgccgcaagcccaaccttttccagttcctgataatgtgcaaatactttcttcggcttgtcattatacatgacagagcctttattcataacgataatgcggtccgcatatctggcaatatcttccatgctgtgggacacaaggatgaccgtcatatcgctttctttgtggagataggcaatctgatcaagaatgtcatccctgcccttcggatccagccccgcggtaggctcgtccagtaccaggaccttaggccgcatagccagcacgccggcaattgccacacgccgtttctgccctccggacagttcaaaaggagaagacttatagtacttttccttaagtcctacaagtttcagcgcctccagcgcccgctccttgcactctttggggccaagcccctgattcttaggtccaaagcacacatccgtcatcacgtctatctcaaacagctgatgctcgggatactggaataccagtcccacctggtttctgagttcccgcatgttatatccttcctcatatatattctcatcattataatacagcgcgccgctggtggcttttataaggccattcagatgctggatcagcgtggactttcccgaaccggtatgaccgatgatcccgacaaactccccatggggaatcgtcagggaaatatccttaagcgcatgcttttcatatgccgttccaaggctgtatacatagttaagatgttctaatctaattgacataatgcttccaccaattcctctttcctaagaatacctgacgggatatccagtccttgcttcttaagttcatctgccaggattgtcacctgggggacatccagacggtatttctttagttcgtctacctgggaaaatacttccttcggcgttccttccattaccacccgcccgtgatccatcacatagatcttatccgcatctatgacttcttccatataatgggtgatcagaatcactgtgactttcttctgctccctcaacttcttcactgtctttaggacttccttgcgccctaccggatccagcatggcagtcggctcatccagcacgatgcacttaggctccatggctaccacgccggcaatcgccaccctctgcttctgtccccctgagagtttattcggagaatggtgccggtactctatcatgccgacagccttcaaactttcttctacacgctgccagatctcgtccgtaggaactcccagattctccgggccaaatcctacatcttcctctactacggttccaatgatctgattatcggggttctggaataccatgccggctgattggcgcacgttccatagctcagccgggtccgtcgtatccaggccattcacccataccgtgccctctgtcggaaccaggattgcattgatatgcttagccagcgtagatttcccagagccgttatggccgagaatcgctatgaactggccttcctttacgtcgatatccacttcgtctatggctcgtgacttgccgaccacattgccttcctcgtcccgcttctcatattcaaaaatcagtttttctgtctgaaccatatcataacccttctccattatgccctctctggttccggatagtcctggcctttggtatctaccgttacctttttcatcttctgtgcctccaatggcctgtcattgtagtctgtaggcgtttccgcgatcttattcactacatccatgcccgtgataatctttccgaatgctgcataagaaccattcagatgtggagaattcttgtgcatgataaaaaactgggagcctgcgctatccggatgcattgctcttgccatagaaaggacgccttccgtatgagccaggtcattggcaaaaccattctgtgcaaattcccctttaatattgtatcccgggccgcccgtaccagtgccttcgggacatcctccctgaatcatgaatccactgattacgcggtggaagatcagtccgtcataatatcccttcttcaccagcgagataaagttatttaccgtattcggcgcaatctccggatataattctgccttcatgatgtctccattttccatttcaatcgtaataattggattttccataatatacttcctctcttttttcaaatatataaaccgcattatctattgtaacggatatttttccattcgtaaagtatcttgattggaatgatatgcatagaaacaggaatactaatcaagacaaagtaagacagggaggatgatatgatgaaaaaatgtaagatattggggactgccgcggccatgatgctggtgctcgcgcttgcagggtgcgaaaataatacggacgatgtggacgctctcaagaaacgggtagaccagatggaacaggaattggctgatatggagattaataataatcttgccgaatcctctcaggataaggccgctattcatgaagtctccgcgtccgatgactctatcgcatctcttacccaggctgtggatgatatggtgtcaaaggccaatgaagccaagccggacggtactgaagaggaaaaaatggaacagttcttcaccctcaaaaaagaaatgaagagcatagacagccgtctggatgcctacgaggattatctggaataccagtaccgccaggagaaactttcccgggaagaataccaaagccaggatcaggcgctggaagagttggaagataaattggacgctgccgaggaccagctggaatggaccttcggcatagacgactaggcaaaaagatgccggatcatacatgtgctccggcatcgcttcatctattgccctataattccgtcttcaaaatagaatccgtcaaaatcatacttatagacgcggtaaataaacttttccatatccatcttataacttgcgatcagtctatgatccttgtcatactcgccaaacatgccttggaatccggaatcaatcaccgtattgtccccaatatcctgggcgctgcttacatagccggaataaggaacttcaaaggaatctacaagtttaaaggttcctgcgttctcgtccaccagatacttatagtaataagaagaagtcccctccttggcgctgttctgtgcaagccccaccgcggcccagtcaaaatctggcttggtttcgctgattccaatattattgttaaacatatacagataatactgtccctccggcagactgtcatcttctacataggagaccgaatgctgtcctccatggatggtaaactctccatcctttgcaaataccaggctttcatactgcgtccctgcccagaaggacttctccgcgatcatatagcccaccgttggagttccatagatatcatcaacccttataatagaggaagtctccctcgaacttaacagcacagatccgttgcccatccactggatcgtattgatatgcatccagtccagttctccttcttcgcttctttggcattccgccttatactccccaaacagagtgccaagatccagcactttggtgacttctccggaatttacgtccagtttgatcacaacatcttccgtgctgtcctgcttcttatccgatgccagaatcagcatattgccgttatcatcaaatacatagtcatgatggacttcatagtctccgaggtcaaagacatttgtcacctgccccgtcctgctcagctgcgccatcttcgtctcagaaatactgtagtacatgaaatccttatcaaagatcagcctgtggcttcggtatcccagaagcggcacctctccccggagcgttccattattgtcgtaataatacataaagtccagagccgtgctgtcatttcccaagaccacgtagagcccgtcttccaactggcttgcatcgccttctacatccgtatccagctgcacatcttccgttcccataagggagcccatctcaaatacgatctccttggtgtccgtggatccatcttccttcgtcaagaaaaaggtaaccttattctccatatcaggtatcaggccaatcacctggaattcatgttctttctggtatgcctcctcctgatacaccgtccggttaaagtcctgaatcttcgggtcttcggcatgaaccgtataggccacgctcaccggctcatccgtattgaaatacacatagagcgactgggtgttggtaccgaatggattgtattctatcagcatgttgctaagcgtgtactcctgagaggacttcttctcttccagttcctctgctgtcttctcctgattctttacatcgtaggtagccttaatcttcttcagagattcttcctgtgtcttggtaagcttcgttgtctccgtatccgtctgcttcgtactgtcttctgtctccgaagttgccaaaaccttcgcccctacgcccgttgcgataaatatcgcagccgccagggcgcaggccaatatcttatttctctttctcaacttataccccgccttttctaacttgattatgggttgctatactcatattctaacaggaatttgtgttcatttcatgaaaatatttcaaattatggaatataatattagaccgcccttttcttcgtatcctgtgtcccacagttccttcagggacatccgcaccgcctgcccataggtggccgctgttatatacatctcctggggcccgtcttcgtagcctaccacgagaaaccagtgccagataaagtctttatacttgtcaacattcttatgcctcagcatcaaatacggcaccggaagccccgcatcgatctgccgtctgatcttttcagccgcttcttcataggaatggcttcctttcaatccttccatggcaatctgtatcccggcgcccgtcttgtcatttacgtcttgaatataccgctggaatccttccatataccattccagcttcttcaccccgccgaccctcggccggatatagggcttcataatctggctgaattgcttatactcttccttattaagatgcatcttgtcaaaaggatagagcgcgtccatgcccatatggagggcaaagtagatacaactgtcgcaggcagtcgcagcgccgcatcctccgatattcataactacatttgtaaaccaatcctggctgcccccatatgcttcttctatcgtaaaataatcaagtctcttactatgcataattctgtcgcctcccaactcaatcaggggcagttccggtcaaatcccttgccagcccgccgcaaaaaggttgaaccagaaccgcccctgattgaaacttgatactatcttaactcatatttcaagattttaggacattgtactgatatttatacaatatttatgctacatattctttgaaatttcttcacataccttcatggcctcaaagattgcgcttctgaatccgcgttcttccagtacgcgtaccgcctcgatcgtagttcctgccggagagcagaccatatctttgagatccccaggatgcctgcctgtatccaagaccatcttggcgcttccaagaactgcctgtgacgcaaactgatatgccagtggtcttggcatgccgccggaaacagccgcgtcagccatcgcttcaatcatcatgaagacataggccggggaacttccgctggtggatactaccacatccatcaggcgctccggaatcatctcgacacggctgaaacactccagcagcgtacggatatatgccatctcctcttccgttatgtgctcgttggggcatgccgccgtcatgccggcccccaccattgcaggcgtgttcggcatagtgcgcacgatcttaacatccttgccaaacttctcggcaagccatgcaagcgtcttgcccggagcgatcgtaataatgatctggctctccttaatatctcccttgatctcattgatcacatcctcataaaactgtggcttaaccgacagcacgatgacttccgccttgtctacgacttccttattgctgtctgtcacctgaatgccaaactgctcttttgcgcgttctcttcccggagcaaatagatccgctccgataatctcctgtgccggaatgatctgcttctttataatgccgcccattattgctgatgccatgtttcctgtaccaataaatcctaatttcatcttccataccttcctttgctcatgaattgtacgagtttcttttgtatacatattttttatttgtatacaattttattcttacaacgactatactatgcaaatcaaagaaagtcaataattatcttgcatttcccctataaatacgttatgatttgtatacaatatcatatttcgtatactcatacagaaaacaaggaggtcccctatggccaataaaagcgcctctctcgcagaccaggcctatgaaaacataaaaacgaatattttaaacctgacctatcctcccggcatggctttgaccgaagccctgctctgcagccggctgggtatgagccgaagtcctgtccgtgcagccattcacagactgcagacagaaggattgatcgtatccgactattataaatccatgacggtcaaggaaatcacagataaggatatcaacgaaatctaccagttgcgggaattgctggaaggggccgcattcaagctgatctttactaccagccgcaacgaggaatactcttaccgcattgaggaaaaggtagtccgcatgtgcgctgctgccaatgacctttatgaatgggaagtggcagatactgccatgcacatggaaatcgtcagtatattcgacaatgacagaatcaaccggatctacgaaaacaacctgtccgaactgatccgcatgggccagtactctgtgaagaatggaatgcatatccctaagaccaatgaaaatcttaaaaagatggtccgccatatgagaaaaggagactatgagaaagcctatgccatactaacggcagatcactttggtaccggaaaggacagcgcgcttaaaggcagataacttttaagcgtaggactgataccaaaagagaataaacctccaactagtaagtttatcttacatcagtttggaggtttatacaatcgttgggatactccctcattttctcagaaatggttacttttcccggtcattcgctgttcttttcagtctgactctccggataaataccagcgtcagaaatgccagtataagcgctgctgcataccacaggattgcagtgtcatctcctgtttttaccggccgcggtgtatccgctggcgtcggagcaggcgcagccggagcaatatacgcatgttcaaaccggatacaactgtacttcattcctgcttcatccagtacgattatctccgctctcaggccatcgtctgtatttttcacataaacttctacggtatacacggttttgtcatatatgtaattttctttttcctccgccgtcttcagttctacacgatagcggtaaattccgccatgtacatattccatagggccgatttcctgattcgctgtgcccgtcatggcaaacgtataacttccgtcggcgcttccctcaggcatgggcgcatttgcttccaatgctgtcaactgatagacaaatctttctgtctgatttccatcaaatgtctgactgatcggcaaatacacagaaacaccgtctttttccgccgcatagacccggctccctacaccgaacagcagaagaactgtcaataatccacaaatgattttctctttccacattctatttctatggctcattctccctctctccttcatcctttatcccatacgcaggagccgcttccctgattaccccaaccagaatgtgtctcccgttcgttgcatccgatgtacaggtactaagcaaaaggagatgatccgctgtatcaacctgtaactgacgcaaatacagcgctttctgcaaaatggtattcagatattcctgccttccatcttctgccacggcgggttgatagatcgtactgtcataagcatctgcttccaggaaagcaaaaaagtcgaccttgtgattacttctgccatagtacaaatttccactgggatgcgcgtcaaaaaatgtttgattcttaaaatctgccaggtctccaaacatagcatgatccgccatatgatgcccatacagaatcgaattaaaatccgtaaaatccttttggtttctgtaatccaggaaaatacttccggccagggaatacttcccttccgcatctgtatttacatacttatcgttatctgacgcctgtgtgaccggataatcaatatgtgtcccatcaactgtcacccaggcgattacctccggattcaaagcctgcaattcttcaaaagatttgctcttatcctctgtcggtttatatacttcataccgattggtatctgctgcctgcagaatctgtttggaatcccacaacacataacatcctaaagtaaaaagcagaagaaaggcggtcagcaccgcaaaatttacggtgccgtccagaagccttatcgtcagcctcccggcagatctgcatatatgcttccctggtttttgctgtctactcaccattcgcctctcttcccgctgttttatcctctgtaatacacgcttaccgtgcaactcttcttctgattaccaagtatcccacaatccctgcagctgcagcaagaatcagaattacgaaaggcaggttgttcataatgatgccggtaatcggtacatccttgtatgtgtttgtgaaagtaactgtattggttccttctcctgccagattggtttttccggtttctgctgtagcaagagaatctacatctgctgccgttttattagttacagtttgttctccattttctacaacagttacgctcggagcatatccatcatccgctgctccaacctctgttaccacatatctggtacctgccggcagattgctaaatactttctgcccaccgtctgccagtgtaaaagtatattcctgaccaaacgtatatgtatcattcccagatacaaaagtgcttccatcgtatgtagccggttttgtaaatgttacgttaaatgtaaacgctttcgttttgtctgccagatcaccaaccgtgtttttcttaacaactaaattagtctttttctcaaatttgtttacaaatttaatctctgactgctttacttcttgaccttctgctccttttgctgcagtaatctgatcaattgccaacccaccattttctgtgtttttcacatatacacgtacggtataaacagatccatcgtaagtcactgtgccattttcaacagaggtttcccctccagtttcccgtaccgtgtaggtatatacaccggcatgcgggaagtccactccactaaagatctctgctacagtcttacttgaaataccggaagttactgtatctgtatctgcattggaataagcaactgttttcgctgaaatggccggagcatctgcttccacacccgcaaatgtaaacgtgaatgtaatgcctggaaccgtaattccctctgcaatctgaaaatctttctggatttcagcatcgaccgtaggtgtgtctgctgctgatactaccgttcccatgcacatgacggctgccatcaatccggctgctgccgctgttttgaattttttaaacttcatcatctttgaaatcctccttcataatcttaatgacttatttatataaattatcgtccagatggcctgaagataaatttatatccctctgtttcgaaccagagtcaggacttttcccagcgtatcctgaatcgaaaccggaccatagatccggctgtcggtactgtgttcccgtccgtctcccaacagaaaaacctgcccttctcccacagtcaaagggaatgcaacaccttccgcatatctgtctgttgtcccgtatatttcagtctcttgctggattgccccattgaccatcagaccgttttcgttgatatctaccgtatcaccctctacggctattactcgtctgacctgtgtttctcctccctgtttcaggatgaccacatccgaagccacatacgccttatccagtctgtaaaaaatcaccaggtctccgtctttcacggctggtctcatggaatcccccgtaaaccggaagattccaaacaccgtggtaaataacagaagaaaaatgataaggatcatcccgattttcaaaagcagcaatcccagttccacagcaagcgatggctgctttttcctctgctgatcattcttcttctcttgcatctttttcattgactactgtctccggccgtgtttcctgcgaacaacgattccaaagatcaatgctgctgccgcaaaaacacttagcatcagaatccccatcgtccatccgctgcccattcccgagattcctgttatcggcaccgtgtccagccggttgatcactgttacggtctgatcaccgttctgtaaagtcccatcagcagcgttctgatattgaacctggtatcccccagcgctttcacggttttcctcaacctgatacgttgttccaaccggaagttgacgcagcgtaaaggtgtccttgtgtcccagttccaccgtgatcgttccatttgttacttcccgtttgcctgtctgcgttgtaccattcactgtttgtgaatatgcataggttccagtcagcggaataccctttgcatctttcagtgttatagtaatctcgaattttttcgtcttatcccccatggtgccagtcacttcttttgcaacggtcaaggatggcttccggctgttggtaaccgtaaatccgtttgtcgtatctccacttacagtgctctcatatccctccaaaggttcttctttcactgtgtaggtatgacctttcgccacataagtgaatgttcccttccactggttgccttcggtcaattgcagcgttttatatggtgttgcagccgcatcctgatacagagataccgttacagccggtttttccacaccctctggtacacccttccagactttcgttacaggaatctgcattgcggaaacctgaactacaggctgttccgcataagcaacggtctgaggtgttccttctcctgtctttccgaaagtataggtcagtgttgcgctttcgttggaatagaaaccaggctgattggaactacttgtgtttcccagggcgtcactgtctgcactgcctgtatgaggatactggccttctgagtttgcatactcatcgtatgctttctgtgtaggaaccacatcaaagttcaccgcatacgttgtatccttgtcaagaacaaagccgtctttaaatgttgctgtaaccgtctcaccatcttcactcagcgttaccgtaatcgtatcctgacctgtaatatcagttacctttccatctttcgtagcagttacagtataatgattagtcaacgttccacccggaatctttacatactcactgagtttatctgtgatcgttacatttctgcaggtgaactctgttatctctcctacgatattctgaaaagcctttttcagcgcttctgtatcatttgccggatagaattgtttcttcggagcactggaactattcgccaaagttgtaaggaaatcagaactcgaagaatttgtcattccaatggtataaaatccctccagccctgtgattttcctcacctgtgctattgcgtgctcccgggcattcttactgcttccacttccgactcctagtgtatatccactttctccataataataaccggcatcaccgtcagacaggaaaatgacgaatttcttcgcatccgttctgctgctttccaatgccgttgctccggtgcgaagtcccgcctcgcagtttgttccgccccccgcctggatgttatttactgcattgtttactgtgtctttttgatttgtccaatcctgcaatagttctgcatcattccagggtatatctgagcctttgttgctaccactgtacgttacaactgccatccgggcattaatctgtgcattttccaaaatagaatccgtcagaccgtccgtttctgtgacaacccgtttcaagacatccattctggagtcttcgccccgtttcgggtctgcatcctcatccattttccagttcatacttcccgacttatcaacgatcagcagaacgtctatcattggtatggtcgtctcggagtcatacatgcccttgacattcaacgtcaaagtgtaatcatcctctgcatttttcttaatatacttctgatgttccggcgctgcctccaaagccgcacctcggcttagatgaactgccaccggatttcccgcgcctacattctgcgcttccggaacatcccgctgtgttattccttccgttgccgcttccttttccggcgtcacctcagcatccgacacagcgcctgtatctgcagtttttccgttgccggaaccgttctccgggcttccttctgtatttagaatttcgtctgtcccgtctctgttgctctccgtccccgaagtttctccgggcactgtttctgccgacacttcctctgccttcaccgtatctggaattttattgctctggttttcagcaaaaaccggaactgtacagaatatcagtagcagacccatcactagtgccaacaatctcctttttttcttcaatcctttcattgaatctcctccctgaaccgcatcactgttcattcagtgtaaagcaagttcttctctattctatgcaacataagaatagttatgttgtcatagaatcatacataaacggagaaaaacttgctctctgttcattagtatagtccaatctgagtgagatgtcaagaaatttcaaacaattcaaccccaaaacggcatcacgaaaacccggagaaatccatgagattttttctttgaaaagatttcagatttcttcgggtctttcttgctttattcataaatgattaccgaaatgacaacataactattcttatgtggtgctccactcgcttaccaaatctaatgtttctatatttttgatccacacctgtattttttctgtcgtatatacccttgtaatctccagactgctgtgtcctaagattcccgccagattcaccagattgtttgttcctttataaaacgttctggcaaaaagatgtcgaaggttatgcggaaatattttgtccggatccactccggcccgtcctgccagacttttcatctctttccatatatttgatcgattcttagggttgccgtttctggttcggaagatcacgccggtctggattccttctctttccacataacgctgcaaattcttttttaacatttcaggcatgggaaccagcctgtatttccctttattccatacttttaccataccgctcctgaggctttccactgtaaaatattccagttcgcttactcgaattcccgtagcgcacatcgtttccatcatcagggccagttgtacccgcccttcttccagagccgtttccactaaccgcttataatctgtcttttccatttctctggcctctcctgtcaaaagcgttccctgcacccggattcttttcagtttcaatctttccccgcccagaaactccaaaaactgattgagggcagccagcatagagtttacactgctgattgcataatgttcaaccagccattctttataggaaagcagctgctctttggtaatccttcgattctcgcccataaaattataaaacgtccggatatctgtaagatactttcttatggtagccttggcattttcccgctctctcagatatacagcaaattcctcaatactctcttttttcatctctattccatgttccatcttgttttctccttttcttttcatgcgtctgtccattcgtattccttatttcccgtatttagcatcaccgatctacagtccaaatatacgcacaagaacgcatcttctatcaaccaccttctttttactctcattttataaaacaaaaaacgctgcaattcaatggatttatttacccaaagaaatactgcgttttattatcatgtagattcatttcaaggtaagcctgtggatgcttacataaattttatcattcctttcgtttcgctcaaggtcatcttagttcccgtttcttccgatagtcgtctcatttttgatcgcataatacacggctttcttctctcccgccagaacgaagatctgtttcgctctggtcacaccggtatagagaagattcctctgcagcattacaaaatgactcatgataaatggcatgacaacgatcgggtattcgcttccctgggcttaacagttgccggaagcgtctccttaaaatttctctaccgaaaactggcgtccgtactttgcatccatcttccacaccgcagatgctccatggcagccccctttcttcctaattgaatggcaattcatcgtcctcttcaaaatctggattcataaaatattcttccatatattcatccatatattcatcatatttctttattgccttatcgatttcccttttttctttctttttacccattgcttcatataattttgaagccgcaatgaacattatatcattttcgtccaagcactctgatttatttataatgaatctatccaccagcgtttctgctgcatcatattcttttgtactgataaatgcatatactcctgaggtagccgccactacatttcctggttctttttgcatccattttttacagaattccacagattcttttgttcttccaagttcacgaagcacagtagcttttctaaatctgatatctgaaccagtatattccggccatccaaacagttcaagcaaatcattacacatcttcaaaagtgtttcgtattcctctctcatatcaatttcatcaaggcaatcttcaagccacccttgaatatcaaatgcgtaatctgtagcatcatctatcatctctaattcagagacaaattggggatcagactttctttcctcaagaataatttctttcataagttcaaaagcctgtagccagcaacttccatccttttcagttcctatcatgttgagatagcattttcctgtcagtttatcaaatcgtttccatttcttattcaacatacctttatctccatctgtgtattttataatgatttcatcagcgttccgcttttctttgcatccatatgctgcgtccgtcctattgtgcagtttgtggatcgtctgctctgccagcaggcgcatatcttttttgtttatggcttatctgtcgcggaacaggtacttctttccaagcagcatcgccagaaggcccggcatggaaaagcctgcaagcacaatccaaagggtcatgttggcgctgtcgccggtctgcggcacatcaatgtcattgttcgggtcgtcggcaggcggggtatgtggaggtttgcttaccaccagcgtgccggtgttaggcgcaggaggcataggttccgtagaagtataggatacagttggttttgcaaactcttccggagcatatgctgtaccattggaatcaacaggatagagggttgcgctgttattcgtatagaggccgtaaccggcgctgccatcattctcgcttccgtcggcatcaaagacgccataagtacctgccgcacgcttcggattcgtcagtttcacagtataggtcagctgtactggtgcaaagttgcttacgggtacattcatggtccatacaaaatgctccgtatcctgcttgtttccttccacatactccagaacatacggataggttccattaaccgcttcaccaaatccatacatcgtctcattcaaggctgttacggcaatggactggctgttgaccttcatctccagcgcttccgcgtgattgacaaaatcaaaatcatagtcatcctttacgaatccaatgtagtcttttacattgcttcccgtatccagcaggtacaaaatatcatggcttatcatggagaagtccacttttttatcgtttgccagatggcccacaaaggaaggtccccactgataattcccgcccgattctgtgtctgccggcattgcgtaacaatgatagcccgtcttttcggcttcctgataggtcacccaggtctcataccatgccctgtccacggacatggcatggttcttcatctcgtccactgatgtacttacacttgcagtacccccgtatggataatcatatgctccattatccgcctgaacctgcctgcccgtttcctgcatccaggaatcccaatcggctggggcgtcattgctgccatatttcaagaaccagttatcggggccggcccacgtagccacagggccgtctgaatcaaaactccatgaaacagcagtcggctcctcgccaaacatataggtaatgccatcactcacaaaaaccaggtacttgcgcgaatgctcgacagccgtatcttcgtccagcagtttcttaccggccagcaggcctgcatgtgtattggttccggaacggatgtcctgcttaatggcattcgcaatctcaccgtagtgagacgacagatccagaagttctgtcacattggcttcctgattgaagatcaccacccccgccttcactttggcacctgtacgctcacactgctccttcaggtcgcttaacatctgcaatgcctgatcttccaatactgcactggtggatttgtccaataccagcacaacatccgataccagatcggcctgtgcagacggcagagagagggttacctttgattcaaaatttccatccagctgcgtagctgtcttggacttggaacgctcccactcaatgggttccggcgcaggagtttcttcgccgaccccggcaaagaccgtcatcggcagcaggagcagcaccatgcagcacatgagcaggatgctgagaagtcgttttttcatgttgcttcctccttgttttcaagtgtactataacatctttattctagcttatagcgttttggattgcaacagaaaaggggcacactgtctacgcagagtgcccctcatcggaaactactagttagagattagatcgtaattaagttaatggaagaaaaaaatcaggcatagttggttcagctacattgctggagatattccaggaatctggctgccatgtcctgattcttacttgtgacagggatggctgcacaggcatcatcgtataagatcatctcttctttcttcaagatattgtctgctcccagaaacagggcatcctttgccatgctcttagaaatatccaggttatctgcttccggcaattcttctatattcatgaaaccatcctgaccgctgtaactttcgtagatttctttgggacacaccagtacgtcgactgcctccgctccaatcaatgtagcaagagctatcttggatgtgctgtccccggtatcggcagacaggttcgcctgaatcttgataatgccgtcttccggcgaaatgccggcatattcggcgaaagattcttctaaccattcaacctgctggctattgccgcctaccacggtgatattaataagcaccttggtgtgtgtgcctttatacatcgtgattccaagatagatagcccctgcgatcagaagcgcccctgcaagccgtgatttgtaatacatccagaggtactctattttctgtcccagggtcataacctgccaggcttctttgatccgcctcgcattcaattgactctcgtccatatgttgaccctctaactggtttttcatctgttcattgctcattcaactcctcctgcattacttttccggtgtatttatgtgagtattccggggtggggagtcctcttctggctcatactttttaaaaattctgtcaaatataatgcaatagattaaagcaatcaccgaaaaaccgcagataccgctaaccataatcaccagtgcaaaagtcgttatcgatactgtgtataggtagagaatcagaccgcatactgcaaggagaacgatggtataaggaagatgccctattgccataaaagccgcattcttgagcacctgcttcgtcgtgcacacaaaatgcgagatgataggaaacacatacaggaacatactgagaagaactgcacagaccacccacaggcagatccggatcacagcgaagagcatggtatcctgagaattaataatataaaaatccattccaatgaatgcgataatcaaaaggtacaatacccacacaatggtgctctgtttgaaattctgccggaaagccttccaaaagttccgccagatataaggatcttctcccctaagtatcttcaaagaaacatagtaaagcgcactcaaagatgcgccgaccgtaatcacgggaatgcagctcaatacaaatatcagattcagcattaccagatcaaagatcttggagataaactgcataattggattatctatattaaataaacgattcatagacaatatccctttcttattgattttattataaatacaacataaatgattctaccggtgcgctgaaattactgaattccttaacttatgtacttattatcctcttttataatctcccggataattgtttcaatatctcttcccgagataacaacatccttaatctcacaccgtctcgaaacttgccctatcatagtcaggctatctgtaactgacgtatcgtattctatcctgatgctatatggtgtcatatccaacacctctgccccagccatccgtaaccgttcctggcgataccagggattcttgtccacttcaaattgaatctgcttttttgtgttaaacttctgctttaccatctgcatatcatcatccactacaatcttcccatgattaatcaacacaatccttctgcacagggattcaatatcctgaaaatcatggctggtaacgatgaaggttgtcctctcttcttcattcatcctgcggatgaattctctgatacgcgccttcgactccgcatccagacctatcgtcggctcatccagataaacaatctccggattatgcaaaaatgcagccgcaatattacaccgcatcttctgccccagggatagttgacgctctggaatcgataacaacgggcccagatccataatctctgtaaaccgttccagattctcccggtatctctgcttcggtatctcatacatccgttggaataatctgtaagactcaatcaccggaacatcccaccacagaagagaacggttaccgaacaccacgccaatcttccggttattctgaatcctctctgtaaatggatcacgtcccacaactctgatgctccccgccgtaggtttcaggatgccacacaacattttaatcgtggttgatttgccgctgccgttgggtcccacatatcctactgcctctcccttttcaacggtaaagttcacgtcattcactgcgcgaagcacttcgtaatccggccggaacatggagcaaaatgatgctgcaatattccctgtattcctttttctcttatactcttttactagatgtcgtacttctatctggctcatagcatttctcctaactatacagttcccctctcggtctgcattttcaatccccgtcaaatcaatgttaattccctgtactttcatatccccggattccggttctccatattacagatccaatcaatccgatcgtgagtgcacagaccggcatggcaaataatacccaattcccagatttacctgtcagatatgcggcaggataatatcccacgaatccaaaaggaatgatgaacgtgaaaaaacacccgatcatggacgggaacacgctcaaaggatatttggcgaattcccggcaggtctgcaccaacacgggaagatcatttccctggatcagccagaaattaagactgttgaagatcagatatattccagaattcaccgcagtcccacagattaagaattccaataagaagaatagagttcctatgccaggcccaatgcccagatgtaccatagaatagatcatgagtccgatatatgccgtcatactgattaccgcctgataatggaaccgttcacctaataactggataaagacagacgctggacggatcatatatacatctaacagcccatccttgacatgataattaattccccagatattatcgaaaaacgactgcccaattgcctcaataatcgcacacatggagaacagcaggcaaagttcatacagattccatctgccgaatcctcctgccacattcgcaatcgtcaccacgccaaggaatgctgacgcttccctcagcagcattgacagaatccatatcaccgtatctgccggatactgggttaccattaacagactgattctctgatatccattccatagccggatataatatcgtaaccgccacatcttttaccctccctgtactacaacgcgcttaataacatggctatataccattctggcagccagccacaatacaatcgcccagataacctgaagtccgacaaaacgtatcgcctctgagaatttatatttccccagatacaggttcaccggaaccgataccatccccgcaaaaggcatgtagttaagaatccggcgcaagttttccgagaataaaaagagaggcacaacaccgcctgataagatcgacaaaagcgcgctcttcgtaaacatcagcccatgatagccataagtataaaatgcacagattcccaccatgaattcgataaaaaacatcattcctaccgatatgcagatactcaagaagaacagaagcaggtttccggctcccgctggaactgttcctcccataaccatcaaaccgactaacgagatcggaattcctttgaacagcagaaagaacacgaattctcccactctttttgcaaacaaggtaaaaaacaaggatactggtcttaggagttctataccgatattccctttgtatatccatttggacaattccacattaatgccgcctgagaactgcgaagacagcatccgggacagtaccacgtatgtcgtcatctgcgccatcgtgaatccccggagcgtctcctgctgccggaatacgtactgccataggaagtaatagattacgattgacgcggcagttccggctatatcaaaccaaaaggctttcatatatgcatatttagttaaaaatgtcatcttgacaagataatagaattttctcattttcgctcttattattaatatagccctctctaatggcttcatatgcgtttttactaatacatcgatatatttgtgaatttcaatgctgctaccggttgtaatccatccacttttcataacctcttacccaatgtgcacttgccgctgtaaaagcaagaaagaccatacctaaaaagatgaaatccgtcatacagtatctaccccataaaaattcttatctttcgccggacatccaagagagccgcaattaatataccacggacgtttgatatgatcgtctcccggcatgatgctccctgcatggtcatgaccatagagaataatgtctgcatctatcccgccaaacatcgtcttcacttgctctttggatgggttctgatggtagttcacataccgattctgctcatccatcgaatagtgcgcaacatataatctcatcacaatttcttttttcaagttcccttaatattaattttaatgcagccgcattattatgaatgtcagtgataattccgattctccccatctttccacctcttcataaaacgaaataaggggagaaggctttgtccgcccctccccctaggaaaatcaagattcttaaggttcctagcctttgattccagactgtgcaacaccttcgataaactgcttctggaagatgaagaacagtacgattatcggtataactgccattaccgctccagccatctgcatcggatacttggtcgtatactgtccctctaaggttgaaagtgcaggaccaagcgtcatcatcttcggagatgtgttgacgatcaacggccacatgaaatcattccatgcgaacttcgccgtgaagattaccaaagacacaatacccggtttggttagcggaagcataatcttccaaaagatctgataacggctgcatccatccaaaagtgccgcttcttccaattctttcggcagtgacataaagaactgcctcagaaggaaggtaccgaacgcgctgaacaggtttggcaggaataatgccggtatggtatccagaagtcccagtttctgaatgatctgatactgagggatcaggaagatctgccccggtaccataagcactgacagaatcagcacaaagattacattcttgaacgggaactcaatatgagcgaacgcatatgctgccatagaacagaacattacctgtacaatcgttgttactaccgttgatataattgtgttcagatatactctggcgaatggcagagccgttatgatctgtccataagcagccaccaggaactgcttcggaaagaatgtcggcggtatctgcatcgcctctcctactgttttgaatgaagtaagcaccatccataagaatgggaatactgtaactccaacgccaaggagaagtgccagatgaacgaataatttctttgtatttgatctacttttcatttcgcatctcctcctaatcgtaattaacccatttcttctgtccccacagctgaattactgttaccagcatgattactgcgaagatcagaatagaaattgccgccgcatatcctttatatccataatcgaatgccttgcgatagaacagcataactaccgtctgcgtgctcttataagccggattcgtctttcttatcatcatgtagataacatcgaacacctggaatccgctgatgatagaggtaatcattacgaagaatatggttggtgtcagcattggtatggtaatcttgaaaaatcgctgtaccgtacctgctccgtcaagtgctgccgcttcatagtatgactgggagattccctgcataccggcgagcaggataatcatattgtatcctaccgtcatccataaaccgacaatcataaccatataaagcgcaatcttcggatcggtcagccatccatgtccttttcctcccagtccccggatgacactgttcagaattcccatcttctcgttatagatccatttccacgccatcgcaaccgcagccgccattgttacggaaggaaggaaatacaaggtccggtaaatggacgttcctttgatcttagaattcagcaatgctgcgatgagaattgacaggaataatccaaccggcaccgtgcataacacgtatttcagcgtattgccgaatgttgcccacacttctttgtcatgaatcatatcctcataattctgcataccaacaaaggttgctatattaaatttgttaacatcattaaaactaaaccatacattctggataaacggccagatatagaatatcaatagcccgatggtaactggtgcaatgaagatatacgctgcgatccagtctttcttcgcacgcttgcttgcccgttttttctgtacgcctgtttttactttaccctcagccatatatatcacctacttaagcgttgttattttgcatccttttccaatagcttatctgcttctgctttcatttctttacatacatctgctaatggtgcttttccgttgtatgctttctgaagagaagttgcttcaaggtcatataattctgctgctgatttacataccggaagcggatatgcctcatctgcatggttggtatatgctgccagattgtagtccggatttgcttttgaaaaatactgctgagcatctgttcttgcagagataacaacacctgtctcaccctggatcttcatagcctctttgcttccaagccagattgcgaaatcaattgctgcatccttgttcttgcttccttcatatactgcatagccgagaccattgatacagttatcttctaccccattgaatgtcggaatctctacacagtcaatcttatctgcgattgcatcattgcctgcatactctggaaccatgtaagagccagcgaagttcatagcaagctgattgccttcgaacataacatcttgagtcgtctctgctaatgctgctgcgcttggagacaatcctttatcaatcatatcgatccagcactggataccttcctgtgtctttggatcatcatatccggtctctgtcttgtcatcgttaatgatgtatccgccgttcgcatatacggtctgataataccatgtctggaaatcaaccgggcaagcgaatggatagacaccatcatctaaccctgctgccttcagtgcttctgctgtagcaaccaggtcatcatatgtcatatcatccgtaggatatgctacgcctgcagcatcaaagatctctttgttataccacagtgcattggtatcgaagtcttttggaaccgcatagttcacgccgtcacgaacgtagttgttcaccagtgtctcagagaaagcgtcattaatatcagacttgtcaattgcgtctgtcagatctgccaggatgccgccatctacataagaatccagatgaagaacgttcacccagaatacgtccggagcctttccgcctgttgctgctgcttccagttttgtaaagtactctccacctttgtatggagttaactgaatctcaacagttacatccttgttctctgcctcatatgcctctacaagtttttccattgccggtctctggttctcatcccagatcccaaaggccagggttgtcttgccaccggatgatccgccgttagatttgccgccgcatcctgtgagcatcgttgcgcccattgctatacacaatccaagggctgccagttttttcagattcttcttcataatcttcactcctttttaatatgattattagtttctatatgaagtttctcactacttacgtcaacagcaagagaaacaaacatatccttcattatctgccgaaatccgcaatcttcacaggcactcctccgtgggttctggagtattctgccgccagcgcacaataatggctctccagggaacgttctatagaggtcacataagaactttcttccttcgctccactgataatgtccaggaattcttctaccatgcggtcatctcctccgccatgccccgagaaattatctgacagactcatcacatcaaccttctcttctgtgatatggctgccgaatctgtagaccgcgatctcacatttttctatctcctgtgaatccatattcactctcagttcacctttcgttcccatgaatcttgcataccgggatacttctggtgtaaatccgcacatggtaaaactcatagtcgttccgtctgtcatcatcaggttcaccacctgatgatctacaacattattatcgcaatgatatacacaacggccataccttccggtcttcatctgcttgagcaatgtttcttctgtcggtccttccggaaccagcacatccaacggccagattctattgcctgagcgatagccaaccaaagtactgtcaagatatattttctctgcatcaaacgggcattcttcttttacactgcatccatccaggcagcgttttgcacatcccttgggtgctttctcttctttaaaaagatacgtatctccgtaggaagtaagggattcacaggtctttcctgccagccacggatacaagtccatgtcatgacagcatttctgcaaaatcatcggactggtctcatcagaattcgcccagttgccgcgcacgaaactatgcgcctggtggaaccatcctacattctctgtcgccactattgataccacatccccgatgcagccactgtccagtaattctttcaccttctgatagatcggcgtgtatcttaacacatggcatacgactaccttgcggtgatatcttctggccgcttcttctaactcccggcattcctccagtttcggagataccggcttttcaagcagcaggtgatatcccttcttaagcgctaagaccgcctgtcttacatgctgtctgtcctgcgtcgcaatgatgatagcatctgcaagacgatcttcctctagcatctcctcagcacttgcaaagcacgcttcctttggcaggtgatgttctgccgccataagagcgactttcttcggatccgtatctgcgacagcaacgatctccatcttatccggatgaagcagtgctgacttggcatacatatctctgccccggcttcccaatcccgcaattgcaaccttcatacgtttactcatttctttatcactcctatcgcgttatctcgtatacctgattcctgaaatcgactgttaccaccgtcccatctgagaacacggttctctgtacttcatagtctccgcctaccatctcgtgacgtaccatctcacattttgctactttctcatgaagttcagatactaccttgcatctttcgatgtcctgatccagggtcagtttcacatccggctcgaacgacccgtcaaaattcggatatgctccatcccggataacatatggagctccgccgttcagcagtgcatacagcatataatcttccgaatcgcttaccttctccatcatccatggctcgatcaggcagtcatggtataccagattgaacagtggcaccggaaccccatacttcggacttcccggctcacgaagcatgaaatcatacggcgcataatggctgaataccatgctcggaatacaccagtcgcttacctcctccgaactaggaaggatcccctgggacatcagatagttgaagcagctggctctcgcatcgtaacactcttttctggtcattctatggcgagggttgttgcactcgtctccctcattacaggtaaatacatccagatatgcacagtccagttcgatccggttcttcttcaactctttaaaattccgtttcacataatatggcgcctgtgtaccgcaaagataggactgaggacctcctgcccatctctgatgctgtgggatcgtaccatccggaagcatacaggcataatcatcatcataacttggcgccgaatgataataatcgcggtactggtcgtgaatcccgaagaggtatccgcattcgtgcatagcatctactaaggaccgcatcttctcccagccgccagccgcttcacatgccggcatatagtcgggatgctggttatcatatccaggctctgcccatccatccagatgcatgtataacttcttaactccggctgcattaagtttcctgatctcttcttctcttttggcaaacgaaaccaactggttattgatatccggcgcatctttatcaaagaaatccgacccctcgctaacataggtcttaatccctttatgtacgaaactgcatccgatcaatcgatctacggacggtacctgcgccgctttctctgccaaggtacgaagccttccctgttcttttacgtattcccggtacgctttacagatatcgttataatcgcagtcgctcagaagcgagtatcttacaactctccggtaatccatctttccaagacttggctcgaaacgcatgcccacatgcgtgtacggccctcctgccggatgctttgcctggtatgccgcattccacggtgtcgtacagatggcaatgtatccttgtcttgctttgacctgagcaaaccatggcatgtacccgcctgccgtctcgaagattccatcgaatatgatcttgcccaattctacttcccaggaattcgggatcaggattccctgctgcatattaagcagcgtataccagttctccttcttctcctcgaatgccatctcgccaggccagtaaaccgcttttaccttgagcccttcttcgcacagtggaatccactcgaaatagacatcttctgttgtcctctcaatccagacatacgtctcaaatgcatacgggagttctcgttccccaattcggaatccccgataagtgctgcgtatgcctgctccaattccgttctcaactttcttatgtctgacagaaagtgcatccttgaattccagatgtccatcttcgcattctagatgtggagaatatgtatctgtccattcccatactgttttctctttgcatagggtaattcggaggctttcttcttcaaactgaatctcggtatgatttatttttatatttgtcatatcgtctttcccctttttgttaattgtgtcgttttttctctccttttatctaatattatattttgttttgcacaaccatgcttatacaattgtctagggttgttgtctaattatccatattctgttataataagcctaaggaggaaaggtatatgacgtacgtgaagaccaaactaaaacgagagattatcatagactctattattacgattcattattttgaatatatgaaagactttgtgttcaatggggaatctcataatttttgggaatttttatatgtagataacggaaccgtctctgtgtgttctgatgacacctggctgatactgaatactggagatattgtcttccaccagccgaatgaattccacgcgatcaagtccatcggcaagaattccccgaatctgatcgccatatcgttcgtctgtgattctccggcgatggatttcttcattcagaagagttttacactgaccgagaatgaacgggaactcatctcacacattatctcagaaagccgcaggagtttctcaacgcctttacatattccttctgtagagcaggtacagattaaggatgagactcctttcgcttcacagcaattagtattaatgtatctggaactttttcttatcacttccattcggaatcatccggagaatatagcaacacagaccagccttcctaaagcctctccggagaaaaaggcgacgaagcaggaacggctggaaaagattctacagtatatggaattccatatctgcgaacagattaagattccggaaatctgcgatacattctccatcagccgctcttccctgcaggcattgttccacgagactatgaactgtggcgcgattgattattttaataatatgaagattcagcgggcgaaggaaataatccgagacggaacgatgaattttacagagattacatattttctgtcttataattcgctgccatatttttcgaagcagtttaaggcggctacagggatgtctccttcggagtattcttcctcggtaaaggggataacggaggcgcttcgcggtagtaattcttaaatggggatgtcggttaataccgatttttaaactctaaatcctaaaataagaatctcccataaaaatcagtgtttttcatacttgatattctgtgggagattcttattgttctttttctgtatatattttagggcgcaaaacacccataactgcatttttgaacatgcacattttttaagccgtcttttcctcggtttttccttcgaattttttaatctcttcatgaagaaaacgatgatatttattcatgttccgaccaatggcatacagcatgaattctttatacaccttctctgacgttcggtagttgaatcttcggaaactatcattttccttgatatctccaaaatgtccttctgtctggatggaacggatctgacgatttagaatccctttctcactttggatgtttgcatgggattcctctttcaatgtttcccattgttcattgatcttcataactttgtttttctcagcatctttttctgcgttatatttatataagcatttcgctttgtgttcacaaccactacagtctgcacatccgtatacctcaaaagtctgggtataacccggctgttttttggtctctgtgcggatatgatgcaatcctcttccgtcatgacaaacataataccgttcatcctcaaatatctgtgttttcatgttgtaatattttccaatatcttctctgtaagcgcgtgttttccgtttttcatgatcctgcagcttgatgtaactggatatcttatttttctttaaatacagaagatttttctcgctacaataaccgctatctgcggttacttcttccaaaatctccccaaatgcatttttatgcttttctaaaaccggaatcagtgtgttatagtctgtccggtcattgcttacataagcatggacaatgaaataattctctactgcgatctgaacattatatgcggcttttaactgtccgttcagcatgtgatcttctttcattctcataaaggtggcttctaaatctgttttggaatagctgttcctgtcctttcccatgatctcaaaacattctttgtatcccataaggcgtttgccgcaggtttctaattcctcataaagctgctggagctccgatttcctcttcccttttccgtaaacaaacgcaatctgttccttctctgcgatctgagtcagatttttctgaagtttcaaaatctccaatggggaacagttgtcaatctcgatgatcgtattattggacaactttttatgttttgtcagttttcgcttccggttcttttcaatgacatctcttaccttatccattccttcgatcacaaacatatgtgcatggggaatgtcatattttatgccatactcattttcatctatccatgcattatacttctgatacagtgaatcaatcatatcgagtaagcctgcgagatgataattgatcgtccctctccacacaaatgtatagcggtttgcattggcctctatttttgttccatcaataaaaagggatttcaatgtgatcagtccttctttttgcaggcggcggagaaactggtaattcaactcatccaatacatctgcagtcagtcttttattcttgaactcataaaaagcatccctttttggtttctgacctttggtaagccagataaatgcaaggtctctttcgcataattccacaatacggtcaacagctctaatcccacgcatgtttgcgtaagtaactacggcatacatcataattgggttatacccggttcttcccttatctgaacaattggccaacaagccagaaaaatctaattcctccatcacttttttcagggtatagactggatcgtcgtcaggtaaacacaattcgaagaaactgaagttaattttctgttgccctaattcaaaaaattcgttataatacttattgtttagcatagttacattataacatgtaacggagaagagatggttgtcgttagccatctttttctcttttatggaaaaatttcaggggcagatgtgacctggtatgagtcacatctgcccctatttggaactatctatttcccgatagccccattttaatttgccctgtccctgattctaaaactctgcttctaagaatgcatgatagcacctgaccgattcatagatatctgccttactggtcagttcccacggtgcatgcatggagagcactgccacgccgctatcgatgacttccattccatagacagccatcaaataagcgattgttccgcccccgccaacatcaatcttgcctaattccgcggtctggtaattcacacctgcattcttcataatccgtctcaaggcagcgatatattccgggttcgcgtcattcgagccgctcttgccgcctttcccggtatatttgttgaatacaggaccatatgccagatatgcagcgttctttttctcatatacttcttcatacattgggtcatatcctgcactgacatcagaagaaagcatcttggaattcgccagtgtacggcgaagcaccagatcattatattctgtactcagcgcaatatattctgctactgtattctcgaagaacttagaagtcattccactggagcccacgctgccgatctcttctttgtcgatcaggatacagcaggacgttctggataccttcttctcctccagcatcgcgaacagtgaagcgaatgcacatacacggtcatcctgtccataggccagcaccatgctgcggtcaagcccgcattctctcgccttgcctgcaggaacaatctctaactccgccgacaggaaatcttcttcctcgattccatagttctctttcaggatatgaagcatctgttttctcactgcttcgtccttatcttccccaagcggacgattgccgatgaccagatccatcttctctgcatctacgaacttctctgccttcttctccatctgcccatatgccaggtgcggcagcagatctgtaattacaaaggttggctcagtatcatcttccccaattgtgatatccaccttcgagccatccatcttaatcactacaccatggatagcaagcggcatggcaagccactggtatttcttaatcccgccataatagtgcgtatccagatatgctacctgggcagactcatagagtggattctgcttgatgtcaatacgtggagaatcaatatgcgcaccaaggatattcattccctgttcaatcggctcctctcctgcctgaaacagaataatcgctctctccatatactccatataaaccttctcctgtggatgtatacgctgtcccatacggattagctccttcatatcacggtatcccgcttctttggcaagcgcaatcgctgttctcacacattcacgctcggtcttgcctttatccagacatctgcgatacttatctgatactgcctcaagttcgcccagctgtctttcatcaaaagtactccacaaattctttcgttccatagttacctccatcataccccatcaggatgattatcctgatgcataatctttaggtatattatagcgaaagttgtgttaaaaagtcttatactatcatcctttgtacttacaggattgtctgaatcaactatctgctggttacttatccgcagcttaggaccttatattgtcaattttataatgaactgatatggttgataagttactggatgcaaggggagaatcagggaatacactgtcctttagtttccccttattcatccatctcttctatatacttgcaggccgccagcgccgcgactgctccgtccgccgaggcagtggtaagctggcgcacttctttggtgcggcagtcgccagcggcaaaaatgccaggcacagaggtcctgcaatcttccgcagcaagaatatagccatagtcatccaatttcacagtctcttcgaaagcctcgttattgggaacctggccaaccgcgataaagataccccctaccttctgttccattacctctcctgtcttcttgttctgtatcttgattccttccaccacgtcagtgcccagaatctcgctcacgatactgtccagcacgaaagtgacattttccttctgcttcaaggtctccaggagccgtttctctccacggaactcgtctcttcggtgaatcacatacacatggctgcagtattcgctcaggaaggaagcatcctgcaatgccgtgcttccgcctcccacaacggcgacatcgcttcctttaaagaatgcgccgtcacagaccgcgcagtaagatatcccggcgcctatcaattccttttccttcggtatcccaagatgacggtgcgtggttcctgtcgccaggataacgctcttgcagggagtctccccatcctccgtcaccacgatcttatggtttccgtctttcttgacagccgttacttttgtataacttagttccgcgccaaaggccgaaacctgttccatcatagttgccgcgaattcatttccgctcatgccggcaatccccggataattctccacatggggcgacaaagtaatttgcccaccgaaggttgttccttcgatgagcattacttttttccccgcgcgcagcccgtagattgcagccgtcataccggcgattccgcctccgacaatcacaatatcatacattggactacctcctcatagagtatcgttaattactctcgatatattttttaatattggatgcatttgcaagtttttctactttgccttcttggatcacgatcaaagtcggcgcctgctttaccccgtatttctccaccagatctgcatgttcctgcgcatctacgatctcgtaatctatgttagccttctccagcatggtcttggccataatgcagttcggacaggtcttggtggtaaaaagaagcttctttggctcttgggcttcctgctttaatacttcatctatatgttcttctgcttttgcttttacctgcagtttggaatggctgagatcatataccttcctatctttgaattcctgggcctttccgtcgttccagttctgaaccggacggtaatagccggtaattctgctgtatacttccgtagtctccccacattccggacaactatactgttcgccgttcagatatccgtgattcttgcaaatggaataggtcggcgacatagtatagtatggcagtttataattctcggcaatcttacggaccagagaggcggctgccttccaacttggaagtttctctcccaggaatgcatggaataccgtgcctgatgtatacagcgtctgaagctcatcctggatatccagggcttcaaagacatcttccgtatagcccaccggcagatgagaactgttggtgtaatatggcgttccatcgccttcggcagccgtgataatatccgggaactgtgccttgtcatgcttggcaaatctataagtcgtggactctgccggagttgcctccaagttatacaaatcaccgtactcttcctgataagcagacaggcgttcccgcatatggttcagaaccttcttagtgaattcctgcgtctcttcatgggtcatatccttgccaatccaatttgcattcagacctgcttcattcattccaatcagcccaatggtggagaagtgattgtcaaacgttcccaagtagcgtttggtatatggatacaatccttcgttcatcagtttagagataaccacgcgttttacatgaagggatcgcgcagatatatccatcatcttatccagacgcgcaaaaaattcctcttcattcgcagactggtaagcaatccttggcatgttgatggtaactactcctacagagccggtactctcgccgcttccaaagaagccgccggacttcttacgcaattctcgcagatccagacggaggcggcagcacatgcttctgacatcgcttggctccatgtcgctgttgatatagttcgaaaaatatggtgttccatatttggcggtcatttcaaagagaagccggttgttctctgtatcggaccagtcaaaatcactggtaatggagtaggtagggattggatactggaagccccttccgtgggcatccccctcaatcatgatctcgatgaatgccttgttgaccatatccatctctttcttgcagtctccataggtaaaatccatctcttttccgcctatgatggccggcaggttcgccaggtcattaggaacggtccagtccagcgtaatgttggaaaatggtgcctgggttccccagcgtgacggcgtatttactccatagataaaggattcgatgcactttttcacttcatgatatgacaggttatctgctttcacgaaaggcgccagataggtatcaaaggatgagaatgcctgggcgcctgcccattcattctgcatgattccaaggaagttaaccatctgattgcacagcacgcttaagtgtttggccggagaggaggatatcttgccagggatcccgccaagcccttcctgtattaactgcttcagcgaccatcctgcacagtatcctgtcagcatggataaatcgtggatatggatatccgcattccgatgtgcctgtccaatctcttcgtcgtagatctcagacaaccaataattggccgtgatagcgccagagttgcttaagatcaatccgcctacggaatacgtgacggttgaattctctttgactctccagtccgtaatctttacgtaactgtccacaatctctttataatccagcatggtagagttcaggttacggatcttctccctttgttttctatacagaatatagccttttgccacgtctgcatatccggccttgatcaaaacggcctccacgctgtcctggatatcctctacattaatcaaagaatccttgatctttggctcaaaatcagccgtgaccttcaacgccagcaaatctatgatgtcctggttatactctttctcctgtgccttgaatgctttctcaattgcaacgcctatcttggacagggtaaactctgctacctgtccgtcgcgtttcattactcgatacataatctgcgttcctccttccacgctttttcatctcaactattaattttatttcgtccggttcttttatgataccacttattgtgtttttgcgtcaataaaaataacaatatattgtgcacaaaatactttttcgcacaatatattgttattgtatagttttactataagccgcgcaattccgccatttgcacacttttcttcacgacctccagcgcctggttcataatgtctttattatatccgtggagcccatcctgtatcaaatcgccggaatctacaaattgctggagataatacttatcggctccctcgatccattttccgatagattcaaaatcagaacgccgatgaaactcctgtaccaccgttgtcctgaattcatagggtactgatccgctcctcaggtactgaatgcttttttctacatttccggtgtcatagccttcaatgcctatcgtcttcccataactttccctggaattcttgatatccatagccacgtaatccaccagccccgccgagacgatcttctttaacttctccgggaagctgccgttggtatccagtttcaccgcgtatcccatctctttaatatttccaaggaactcttcaatcccatgctggatcagcggctctccccctgtgacgcatacgccgtccaggattccctggcgtttcttcagataggagtacacctcctccagcgagatctcctcattcttataggtgtcaatcaccaaagatgcattgtggcagaacggacagcgaaaattacagcccgccgtaaataccgtacatgcaaccttccccggatagtccagaagcgtcagtttctgaagcccttgtattaccatacctgtccctccctatgccttgaaatgctccatcatgatcggcatacactccttgctgtactgccccagagaatattcccctttgttcaggcaccagtccgaaaccagggcgcgctcgcacatggcataatatttcgtaatctggctgactgctacatccgtccgtatctgtccgcgcttctgcccttcttccacaatcttggtgatcagtttataataattgcggttcctgtccagcagatggctctgtccctctgccacaagctgcgtggaataaagggaggccagcagatcaatgctgatcttctcctccatcatcgtatgcatctcacagtttaaatatagcagtttgaagaaactattcatttccggatccatctttgcttccaattcctcatagtagtcatccagaatcagggataacgtattaagaagctcgtctttggtattgaaatagtaataaaacgaacccttcgatgtcccggacagttcgatgatatcatctactgtcgttccattataccctttctcatagaagagctgccaggctgccgagacaatcctgttctttatgctctttttctctgtctgtttttccatccttatctctccacgtcgtctgtttcttctatcttaccacactagcgtacataaaaacaactctcatcaaccgtaggtatgtctttggaatcaatccagtcgatggagatgaagccgttcctgttaagcccttccatcaacttgtggatcatgggctccctgccttgaatctccatcactaccgttccgtcatattcgttcattacccagccagtaagtcccagggacttagccagatatttggccgtatatctgaatcctacaccctgtaccctgccatagaagaccaggcgctttcttacatctgccatattctcaccgtttcccttgtaaagtcttttattattgtaatccgattgcatggaaaaagcaaactttgacacgtaacatttttaaaaaatgttacgtgtcaaagtgaaaaatgttacgtgtcaaagtgaaaagtgttacgtgtcaatttaaaaaactggtgcgcaaaattaaaaaactggtgtgtctaattaaacgactgctcggttctttcgataatctcatcttgcagcgccttgctcagattacggaaatgatcgctgtatccggccacgcgcacgatcaggtctttgtagtcttccgggtgtttctgggcctggatcagggtttctttatctatgacgttgaactgaatgtggtgtccgtccatgttgaagtaggtacgcaccagattcgccatctgattcagcccttcctcgcccgcgactacgcttggggtgaacttctggttcagcagcgttccgcctgtctggagatgatccatcttggcacaggattttacgactgccgtcggcccgttggtatctgcgcctttttccggggagattccctcggataccggcttgtgggccagacgtccgttggggcttgccatcattacatcgccgaaatatacatggcaggtggtaggcagcatattaatacggtaggtcccgcccagcatgttcggccgccctgtcacctggcccctgtaatactcgaagacatccctcatgatgctgtctgcatactcgtcatcatttccatacttaggggtcttgttgcttacaaggttcaggattctgtcgtgcccttcgaaattatcatccagagcctgcatcagttctttcattgagaagttcttcttttcatatacattatacttcactgatgccaggcagtccgtgatggttccgattcctacgccttgcagatacttggtattgtatcttgcgccgcctccattgtaatcttttcctttagaaatgcagtcgttggtgataatggagaggaacggtaccggcatctcttccgcataaatcttctcaatcacgttgcttccttggactttaatgtcaatgaagtacttcatctgcttcttaaacgcatcgtacagttcttcataagtttcaaactccgttgcatagcctagtttcagtcccaactgctggcctgtcatcttgtcgcagccgttattcaaggtcagttcaaatatcttcggaatgttaaaatatccggtcaggatataggcttcattgccaaacgcccccgtctccacgcatccgctggttccgccccgccttgcgtcttccagggatttcccggcatttagaagttcctgcacgatagcctcggtattgtagaaagcaggctgtccccagcccttgcgggaaatctcgcaggcgcgctttaagaacttctgcggtgtctttctgctgatctgcacattggaacttggctggagcagtttcatttcatccatgcagtccagtatcagataacttacattgttgacgccattctctccgttcggcgcgatccctcctgtattcaaattggcgaaatccgtataggtactgctttccttcaaagtaattccaaccttcgggggcgccggctggttattgaattttacccacaggcattccagtaactccagagccttctcatcatccagaattcccgcttctatatcccgctcataaaatggattcaggtgctggtctaagcgtcccgggctgtatgcatcccaaggattcagctcgctcgtcacgcccagatgcacgaaccagtacatctggattgcctgccagtaggtctggggcttatgcgctggcacgacatcgcagttggcagcgatttgaagcaactcttcccggcgctttggatcgctctctttttctgccagttccctggcgtatgcagcgtagcgttccccaagaatcatgatggcatcgcaggcaatcttcatgccttccagctcgttcttcttatccagggcttccggatcatgaaagtaatccagccggtcaatcgcctcctggatgtcctgtctgtagtccagaaaacctttttcatatattttcacagagcccaccgtatgccctggtcccctctgctccataaattcagtaaaaagcccagcctcataggccttcttccactccggcgtcatctgcctgagtatcttattccggatgcatctcttatcccagtatgggatcattatcctctcctggagttcaaaatcctcttcctttactttgaaactgataagttcccggtcgttcattacctgcatatcttccatggtatggcagcacaattccggaaacgtcggggatgcctgcggagagtctcctttttctcctacgatcaattctccctcgccaatgtacagagtcttggtcgaaaagtaatccttcagtacctgggcgcgaagttccggtatggagagtgctccttcatatttctcataggtatctgtcatgctcttcgcccgctccatatcaatgtgcgccggcgtctccaggcttagtttcctcagttttctgatccgttcattcattcctctttcttccatactgctagcctcctattttgatattgtggaatcctgcttccttaaataaatctacaaaatgttccatttcttctttttccggtgcatgaagttctgttccttcgtatgtcctgcctatcttctcatacttccctgaaccggtgttatgataaggtagaagattaatatttgccacccggatattcttctcttgaagatacttgatcatcgctttcatatcctcatccgtaccattaacctccttgatggtgggaatccggatatagattcttgcgcccgccgcgcttaatctttccagattggacaggatcgtctcattccctgcacccatatactttttatgtatctgactatccatcgttttaatatcatacaggaaggtgtccacatatggcagaatccgggcaaagttctcatatggcgcctgtccgcaagtatcaatcgttacagtgattccatgccggtaaagttttttcgctagttcttctacgtagtccatatccgctgtcattacctcgccaccggataatgtgacgccaccgccggactcttcatagaacatctcatctttctttaactccttcaccaattcatctacggagtattctcttcctacaatctctcttagattctgattacaaaaatccacgcacgtgccgcatccgtcacagagccgcatatccgtgaacactttcccctcttctccgcgaatcgcccggttcggacaggctggttcgcagtttctgcatcctgtacatctttctgcgtcatacagcatctgcttcttataactctgggtttccggattatggcaccatacgcaccttaattggcagcccttgaaaaaaacggttgttctgatgccatctccgtcatggatagagtatttctgtatactcgtaatcaggctcatttttccacctctctttttttgtatcccgttttagactatagtttgtactttagtctaaaataccaaaagcaaaaccggttgtcaagtatttaacagccggtttctgcccttccatcgtcatttctacatattcactaaaatttcatatacatttccggcaaatcgaacaaagaaatctgattgtccctgtcggacttcacgtctcgatccgtaatcgtctcatcgcctttcaactgtccaatcagcagcggcgaaagtggattatgctgctgcatcctccgccgggcgccttccaggccgcttgtcgcatagcaatatttgcagccgttgatgcaggtgtcatacatcccaatatctatgctctcaatacagccgcattcccgccgctgtcccgcatctttcttaagatccagcttatagccgatcagattgtggatcttttctttgtcaatacaggctccatgctcaattcccaatctgctcaagtccatcttttccgcacaggtatagagcggcaggccattttttttgccaatccgcgccagtccttccgccagtcccactatatcctccggctccatctccagatacgggctgtccttataggaatcgataaaacttatgatgcatctggtcgtcgccttgtgaagccactcgcacatcatttcaaaccgctccagatgataagatatggaatacttctccgtcagcagaagagggtcaaacctccagtccacccgctcttttcccaagcgctcgctaagcagcaggaaggtggccatagactcttcagtacggggaacgttttcctcaatatcctgttcataatccgtaatcgtcatctggaaataatagggatatcccattttgtcaatcgtactcagatagggaatcagaggttctggattcttcgtccaaaaggcaatacaatctatcgtatccggcgacagctggatacggcttatcttcttgcggttatatggatttgggaccagcacctctccggcctttagccggttaatgaaccacttcggatataaagccgggatatccgtccttctgcttgcactgattatcatcttcacactcctgtttcacttctgtctatcttataacgaaaactatctgcctctcagccaaaattcttagcaatcagcctgcaatattccaggaatgccggtacctctttaaaggagtctgccagcacatcccgtatacccttataataccatccaatggtctccttgtccttcattcgaaaacggttccatagattttccccttctgcgggatagtccctgtcaatgtccctcatattagacagcttgtccgccaatccaatcatctgcacttccctggaggctgtgcgtagatgctcaatggtagcacgctttcgctccatccaggtcttggacttatcttcactctcctgggcgaccataaaggccacccgctcagagaattcctgggccagaattctatgggtaatgccttcgcagtcttcgatcgtgtcatgcagcacagcggcgctgatcacttcctcatcgtcggtcattgtcgccacgatatccccaacttctaccgggtgcacaatgtatggcctcttggttcccttcctgaattgtccttcgtgtgccttggttgcaaattcaattgctttgtcaatcataatgtacctctcttatcattattgatccaacgtggtttcgatttcctctataccttcacgaagtcttgccttttcttttttatgaaacagatcaaagatacaagggacaactactaaggttaatatggttccatatatcaatccgccaattgtaacaaccgccataggctgcaccatatccgagcccattccgaagccgattgccatggttgacaatccaagaattgttgtaagagccgtcatgatgatcggtctgagcctggtcttgcctgcctctaccaaggccttttctttttccataccggccgcaatcaactggttggtatagtcaatgaatacaataccgttattgactataatgcctgacagcattacaaacccaatcatcgcgattacgctgactgccattcccgacatccataaggcaagaaggcctcctgtgaatgccagcggcacggtaaacataacgatgaacggagaacgcagagactggaactgcgccaccatgatgagatacataaatacgatagccagcgccagcatcttaaagagttctatcatcgcctcgttgatagtctcatcttctccagtcatctttatctcgtatccttccggggcgtcgtaggatttcagcgccttcttcacccggctgctgaccaggccgatattatccccatccttaatctctgccgtaaccgacatgaatcggctctgatctttccggctgattgctctaaggccacaggcgtcttcgaatgtggcaatgtcggccagtttcacatcttctgatgttccatcctgcttctcggcagtgatggtcagattgcggatgtcctccctgctaaggctctcgttggcatcatccagtacatagacatcataatcattggtatcggttgccaacgtggtggccgtctgggcttctgcaagttttccatacagctgctggtatacttgagccaccgtaaggccatgctgcgttgcctttgtcttatccactacgacccgcagttcctcgttattgtcttctgttccatccagtacattctgagttccttttgtcttctctacgattcccttgacatcatttgctactttctgtagtttatccaggtctttcccctttatctggatgttaatccccgagctgccaagagcgctcatatccatattggacatatttacggtaagttcgccgtcaatatcctttgttacgctttcgatctttttcttaagctgtccattgtccagggacggatgatcctttgtgatcgcgtagaattcaattacattcgattccgtctgcgtccccatcatatcagatgcagataccaggccgccgatatccttgatatcctcaatctttccaatccggtccattacctgatccgccaccttggctgtatcgtcaaggctgcttccctcttctgtcttaagcgtcatagcgatctggttgctctccatctgaggcatgaattctgttccccttgacagggccaatgcaatgcttgctatgaacagcgccagagcccccagcagtaccagaaacttcttatgcagcgccttttcaagcagtttgccatatccctgcctgatcttggcgaatatttttgactccttatcttccgtcttcttcagcaatcccgcggacatcataggaaccagggtcagagccacagccagactggccagaagcgagtatgcgatggtaagccccatgtctacaaacagctgtctggtgattccactggtaaacacgattggcaggaatacgcagaccgtcgtcagcgtagaggccatgattgccccgcctacctgtcttgctccttctatggccgcttctttggcggaagcgccctcttcattcctcatgcggtatatattctcaattacgacgatagagttatccaccagcatcccgacacccagcgcaagccctgataaggatatgatgttcagggttacccctgagaaatacatggcaaccagcgctgtcatgatactgatcgggatggagcacgcaataacaaatgtaggacggaggctctttaagaataccagcaggataatcaccgccaatatggctccaaagatcaggttctgcaatacggaatggacgataaggtcaatgtatacgccctgatccatcagcgttaccgtcttgatttctgcgttatccttctttaaacgatccagtttctcgagcactcgcttgcttacatctccggtagagtacccggtctgtttctgaacgcttagcatgactccgggcttgccgttaatcttcgcgtacgtctcatccgaattattcaccagttccacattcgcaatatccgacagtttgacaggatcgatgccttccatgtctatcagcacaagatccttgatgtcttcaatgctcttgaacttgtcgccgacgcggaccaggtaatcaattcccccctccgtcacataccccgcaggcatgctgaagttctccgcggccagaatcgtcttgaccatatccgccgacaggatgctgcttacatccgcgcttcctgctgcctggctttgcgccgactccatctgcgcttcctgcatctggattgccgcttctcctgctgccagctgggctgttccttccccgatgcctacagccgcctccagctggccggatgccagccggcctctggcctgcgccagcgtcatagccccgttatttacctgatcctggatggactccaactgcccctttcctgccgccacctgatcaagtccttgctgaatcgctgcttcctgctgcgccaactgctgggcggtagtttccaaggtagaatgactcgtgtcgtaagaatcaatgattggctgtagttcgttcttctgcgcctccaatgcttctctttgatctgtagtaagatccgggctctgtaatgctgcaatgatctggtcgtaacttgcttttgccgtctccagctgcgtcagctgagcctgggctgctgcctttgccgcctgtaccgtggcgaggctctgcttaagctgggtttcggtcacgttcagttctgccattttttccgtgatctccagttgggcctgcttaatctcctcgcttttggcagatatctgggactccgcctgggcaagtccctgagatgcctgggaggtgcctgccgccagggctgcctttccgctttccacctgcgccttggcctcatccagggccgatttggcatcatttatctttttttccagttctgccttgatatcatcatttaattccgtaaccttctgctcgttgacggtaatctccaccgtattctctatgcttccagaagcagccacagaagccaccccttctacgctttctacttctggaattacctcttccttgatcactttgctggtttcggccgcattatttcccccggcactgaccgcagcaatcagtacaggcatcatatcaggatttaatttcatgataatgggattggaaactgcatccggccagaatccttggatctgatccaggctttctctcatctctatggtgacggagtccatgttcgtcgtctgttcgaactccaatatgaccgtagatgcattttcattagatattgactgaattgtcttgatattgctgaccgcagccattgtctgctcgactggcttggttacgacttcttccacctcttccgggcttgcgccggtataggtagtcattactatcgcgtatggaaggttcatgctgggaagcagatccagcgtcatattgccgaatgagactactcccaggataataatcagaaccactcccaccactactgtgtaaggtctttttacactgaattttgataacatactcgtcctctttctcgtctttactttctcgcctatactttctcgcctatacttttattgccgcccgaaatatgcatggcggctcatatgtaaatcatatcacttggaactttaattagcaatgattctggtatataatgataagtagaaaaagggaatttttataattattttagaatctcggacagggggcaatatagatgaataaaaaaacggttctggttacaggtgcttccaggggaattggaaaaagcactgccttgtatttcgcagcgagagggtatcatgtttttctgaactgctgtacttccgtttctgatctgaacaaggtaaagcataccatagagacttcctatcatggctcctgtgatatcgtgcttggcaatgtgggaaagccggaagagacggatcagatattccggcacatctacagcacatgcagttatctggatgtactgatcaacaatgccggcgtctcttatatcggactgctgacagatatgagcaattcggagtgggaacatatcattcagacgaacctgtcttccgtcttctactgctgccgacacgccatccctcctatggtagccaggaagtccggcaagatcatcaatgtatcttccatgtggggaacctccggcgcctcctgcgaagctgcgtattctgcctccaaggcaggggtaaacggtcttaccaaggcgctcgccaaggaactggctcccagcaatatccaggtaaatgccgtggcctgcggagtcattgatacggccatgaatcagaggcttaccagggaggaacgaaaagatctggaggaagagattccaatgggaagattcggtaccaccgatgaagtggcaagcatcatctgggatatcgccaatgcttctccttatatgacggggcaggtaatcggggttgacggcgggtatctgtaaaatttatatgagtttaagaaagccggcatcgctttagatgtcggctttctcatttatttcatttccaatacgatcggacagtggtcagaccccattacatccgtcaggatcttcgcatccaccagcctctcctccagcgattctgatacgcagaaatagtcgatacgccagcctgcgttcttggccctggcgctgaagcggtaagaccaccaggaatagatcccttgggcatccggataaaaataccggaacgtatcaatgaacccggcatctaccagcgaggtgaacttagcccgctcttcatctgtaaatccggcattcttgcggtttgtcttgggattcttaaggtcaatctccttgtgggccacattcaggtccccgcagaagatcaccggcttcgcttcttctaacttcttcagatatgcaaggaagtcatcctcccactgcatacgatagggaagccttgccagttcattctgagagttaggcgtatatactgtaataaaataataatcttcaaattccagggtgatcacgcggccttcctggtcatgttcttcgattccaattccgtaagatacggatatgggctcctgctttgtgaatatggcggttcctgaataccctttcttcttcgcgtagttccagtactggtgatatcccggagtctccagttccagctggccttcctgcatcttcgattcctgaatgcagaaaatatccgcatcagcctcctgaaagaactccataaagcctttctgtacgcaggcccggattccatttacattccatgaaacaaacttcatctatcttcctccaatatatatagtatgctctctattaataatacactttacgcaggaaaaggcctcttgcaggagcaaggaaacctgcaaggctcctgtcttctgccgcgattaccaccggcagcatggatgcatccctcttcccggtaccgatttccagcaaagttcccgtcaggatacgcaccatatggtagagaaagcctgtcccataataggtgatccttaccttctcgccggtgctgacaatcttgatattaataatacggcggatcggatctttgcactccttatcatcagtaaaactggtaaaattcttaggtccgatgagatactgtaccgcgtccctcattgcctcgatatccagcttctccggataatggtagcagtagcggcgcgagaatacatccggcttctcccggcagtcaatataatactcatattttttcccttttgcgctcttgcgggcatgaaatccgttctttacaagttctacttttacaatccggatatcctccggaaggtagcggttcagcgaatccttcagttcctttgtatcatagagtttggaaagttttacgcttgcaacctggccacgggcatgtacgcccgcgtccgtcctgccggagccatccacatgcacgcggtatcccactaatttgccgatgctccactccagcacgaactggatcgtattgtccgtcgtggcctggcgctgccacccctgatatctgctcccatcataagcaatggttaatttgtacgttctcatatatctcacccaatctaaaaatcgtattctttatcagcatcttctgtttcaccaaaattatgtaagaaaaaggaagaagcaaaccgactcttttttgcttctcccttttattctatcactttatggcccgcttagcaaataccttcttacattctacttcaatatctttttcaactcatccataaaggtattcacgtccttaaactctctgtatacggatgcaaatcttacatatgcaacctcatccagcccttttaactcttccatgacgatctcgcctattgtgctgcttggaatctcctttgcttccaggctgaatatcttcgtctctatgccgtcaatggaacgctggatgtcttctgcagataccggcctcttatagcaggcgcgcagaaccccattctcaatcttctttctattatactgctcccggttattatccttcttaatgataatcagtggaatcgtctccaccttctcgtaggtcgtaaacctcttgccgcacacatcgcatgatcggcgcctgcgtatggagttgccatcttccgccggcctggaatcaataactctggtatctggatgattacaatatgggcacttcatctcgacttgatcctttcttttcttaatacatatagtatatctgctcgatattcagaagtcaaatctcttttgattcttttttcggtcatccctcctcatggatttccacaaggattatatccggtccaatcttccggatgcatttgtatgggataatatattccgccccatcgctgaagaagccgcatagttttccgcccttgggaatgaccagggcctcgatgcatcctttgcactcatcgatgatcaggtctacaacatatccaagtttcttacagtcgcacgcattaatcacttctttattctcaagttcgcacaggcgcatgccggcacctccttttatccatatgggaccaatataaaaatccgcatatactacttactacatagtatatgcggaacctctgcctcttgccttatgcggacattactttttcgctttcaaacgcctttacaatgacgccaagaaggattgcgcctaccgccagcgtttcagccagcgttactccatactggaacatggtgacctcctggcttaagattccctgaagcaccagcgcattattgtaaaatgggatgaaataggtcgtctggctgggttctcctgacgtaaacatggtgaacagccctacgatcaaaaccagcatatacgctggcatcacgtacgtgcttgcctccttggtagacttggcaaacacggaaatcagcgcaataatgctggaatacaggaaggaaagcgctaccagcatcgcaccgagcatgattccctgctgcgggcttaagctgatgctcagcttatcaaggcctcccatataacccatcatgatcggagcgcatatcaccatggcgatcacatagatcaatgaggaaatgccggataccgtcatcagggagaataccttgccaagtacgatggaacttctcttgatcggagataccagaaggctggccatagtccccctctccttttctcccgcgatcatatccgttccgattcccattgcccccgcaaagagaagaatcgtaataaaatatgggagcatcgttccgattgccttgccgctggccttcttctcatcctggatgtacatttcatcattgtctgaatttatctggaatacggtcagctgctccatatcgctcaccctctgggacagcaggaactgccggtaggcctccagcgccgcgtccatattgtctgctgctgccctggaataatcttcggacggattctggtatgtcttgacctgaggaatcttgctgcccttccgatagccttctacctcctgccggaagttatccgggaattccacgatcagatccgcttccccttccagaatctctttcttagcctgcttcatttccttcgcgctgtcaatgtcctttaacttgaacttcgcccccgaggcatccaggatatcattcagcgtctccggcttattcattatgtagacctgcgctacatgggattcgatatcatcctccatattggatgccagcccatttacaatagacaggatgaccaccataatcagcaccggaagtagaaatacggagaataccatcttcttgtctttgaatatcctggccatctccttgttaaatatctgcttgattccgctcatcttactcatcccccttctttgacttgtagaactcgaagaacgcgtcctccaagtctgccgcattggtctgttccagaagctgctccagcgttccttccgcaaccttatacccgtcaatgataatgccaatcctgtcgcaaagtttctctgcttccgacatgatatgcgtagagacgatcaccagtttgccatcatctcttaatttcttcaaataatctgtcacgcttcttgccgtaacgatgtccaggccattggtaggctcgtcaaatattacgatatccgggtcatgaaccaggctgaccgcaatggctgccttctgcttcatgcctgtagacagttccttaatcttcttatgggcgaaatcctgaattccaaaataggaaaacagttcttccttacgcttttccagcctgtctttcggtatattgtgcagccttccgaagaatccgaacatgtagtctacatcaaactgctcatccagcttgatatcactggtcaagaatccgatactttcgcgcacagactccggttccttctgaacctcgtggctattcacatagatctctcccttggtaggctttatcaatgtggcaatacacctgagagtcgtagtctttcccgcgccgttgggacccaaaagcccatagatctccccttcttctgccttcaggctcagatcatccaccgctgtcttcagcggattcttcgtcttggattcagccatctgctttttattcagcttatacaccttggttaaatgcttaatctcaatcattgctctctcctcacatcatccttgtcacatagtttcattgtactagtaaactagtacaataatattatattttgtactctttgtcaatagttccgcacgaaaaaccggagatgcagcatagatatgctgcatctccggcagatttcctattcttcaatatcaattacggatacaggacaactgtcccttgcctccgttgccgcgctttcatactcaggcgccacatccgcgtatgcttcagcaacaccgtcatcattaaaccggaacacttccgggcaggctgctacgcaagccccgcatgagatacagccttcattgactctggctttcatagttcattcctccttgcatttttcaagtagtatgccctatttttccaattctactcgtgtccattattttataatggtaccggttctgcctttgagcgcatcctccaatttatcaaaggatgtaatcaacgcccttcttccttcacgcttctctataaacgctacagacgcgctgaactttggaagcatattgtactcgccgaaatggccttcttccatatactgtctggcctgttctatggtaatctcgcccagttcctcttcctgcggccttcccatattgatcttgaccttttcaacgctggtcaggatgagcaattcgtccgcatccacctcttccgcaagcttgccggccgtcagatccttctcgatgactgcgctggcgccttttagatgattgtcctgctttagtaccggaattcctcctcctccgcaggccacaacgatctgatctgcatccagaagcgctttgatggcatcaatctctacaatgctgaccggatttggcgcagatacgatgcggcggaatccctttcctggctcttccaccacataattgcctttcttacgctcttcattggcttcttctgcattcatatagcgccccagcactttcgtcggcgtatagaatgcctcatcataaggatctacgatcacctgggtaagaatcgtactgaccgtcctgtatatcccgcggttcagaagttcctcccggataccattctgcaagtcatatccaatgtatccctggctcatggcagagcatacggacataggagctgccgtgtagtcctgatgcgccttgccaaattcattcatagccgtatggatcattcctacctggggcgcattgctatgtgtgattgccacctggcagccattcatgatcagatctgcgattatctttgatgtcttctttaccgcttccttctgctctggcagggtggtgccaagggcacggtgtcctagtgcaactacaactcttttcttcatcgtctatacctctgcttttttgaaaaatactatcgtgaaacataagaaaattatagtatctttctatagaaaatgcaatgttggatttgaactgcgcaggggcactatgcttttgcttttctctgcagcatgcaggctggtttcaatgtcgccggcatggacttaataagaagatagatgatcaggcatgaaccgatcttatctaccaggttattggcaagttttggaaggaaagaagcggcaaatatgcttgcaccgctctgcttaagccagacaaccgccacatcggaaatcgttcccgtaagtcctccatatacggcgattccaatcggcgttccaataatcggagcgataattccaatcgcgattcccgcgatcactacattgacaagcgtaaacctcgccttgcggaaaataaatccgataaccaggccgatcgcgatatttaccagcataaatggcatatccgtcattccatttaagatcgcggtcaggaaattagtaagacctccaaccgcagcgccataccatggaccgaaatatatggcgatgaagatcgtgccgatggtatccaggtagaccgggaacttgatcattgccattacaatcccaaggacaatattaatggcgattgcaagcccgcacatcataagtttcattgtgttagaaatttctttgttcatagtgattcctcattcctttgtttatttcattgctacgctgtaatcgtatcagctggtctcatagttttccaatcattatttataatagatagggaactatattatatttttctatagcctttccggttcaagaactggtacaatagtcctgtcgataaatgaaaatcagccagcacattcatgtgttataaggagtatcccatgaaacagaaaattgttatagtcagccattgctttctaaatgatgccgccaagctccgcaatcaggacgctgcggatatggagcaggaaaggacaaaaaagcggtcatttctgaaggaattattagaacaggaaattgaagttctccagctgccctgcccggaattcatcctatatggatgcaaccgctggggacacgccgcttcccagttcgatacgccgcattttcgtcaggaggccaggaatatgctactgccgatcgtcatgcagctggaggaatacgcagcctatccggaccgctatgacattctgggcgtctacggcatcaatggcagtcccagctgcggagtagactatacctacgacggagactggggcggcgagcttggaggcaaggatgccccctgccagttagataaggcgtacaggcccggcatttttatggatgtctttgcaaaactactggaggaaaggcatctctccataaagttctacacgctggatgccgaaaaccgccccatataaagaaggcagggccactcgccctgccttctgattcatcctctggctatgccgccacgatatacttgctgatctctttaagcacctcatcgcagtcttcactgtatattcgcagtttcaaccgattgcccagacctagcgcaataatccccagcagggatttggcatctgccaccgagttgttgcctcgcagaatatccatgctatatgggaagcgttctactgtatttgtaaattctactacttcatccgggtttttgaattgaatgattacctggctcatgtggaatactcctttctctcattacttatatatgtatccagcccatagccgttaccatacatcgatttcattcttcccatatatcttacccggaaaaaggaaaatttatacaatctaattcctaacgtgttttcctttttttgatgccatttgctggcggcaaacgaaaaaaggcataacttccagttatagaagttatgccttttgaaagtcggggtaacaggattcgaacctgcggcctcacggcccccagccgtgcgctctgaccaaactgagccataccccgctagagatattctatcgaatcgcgtcgaatattgcaagtactattttctttttttatgaatcctttttataattcccatttctatggtacaataatcatagtttatatcaggtatttcattgtatgtgaaaggagtatatattatgaaagtaatagttgtaggaccacgaggaaaaatgggaaaactaatcacgcaggcggcggctgccagggatgacatggaactgatggctggcgtgggaccaaagggccgcgattacataggaaaggatctgggaacggttgccatgattggccgcgagctgggcgttcctgttaccgatgacttggaaagcgttattgacggctgtgacgtcattatagatttttccacaaaggagactgctatggacgtgctgtctcttgctatctctcacaagaaggcacttgtatgcggcaccaccggatttgccgaagaagagatgcagcgctttgcggatgccgccaaagatattcctatgctgtacgccgccaacacttccaaattagtcaacattatgaataaattgctggaactggtagccacgactctaaaagatgagattgatatcgagatcctggaaatgcatgaccagtggaaaaaggatgctcccagcggcacttccagggaaatgggcgaaatcatggcccacgcttttggcaaggaattaaaagatgtcgccgtatacgggcgggagggtgtatcgcccagagagcctggcacgattggctaccactccctgcgggcagggaatatcccaagcagccacaccgtattctttggcggcatgggcgagcgtcttgaaattacccaccactcttacaactgggaatgctttgcaagaggcgcttgcgactgcgccgcattcctggcagataaggcgccgggcttctacaccattaaggatgtattaaacttataataaatcgtaaattcttcttgccatctgacaagcaaggaagtataattgtattaatcaaataatacaattatacattatctaaaggaggactatgcaatgatcttagtaaatacagattatatctcaggtaaaaattttgaaatgatcggccttgtaagaggaaccatgatccaatccgttcattttggaaaagatattatgaacagtttcaagactctggtaggcggcgaacttacatcctatacagagatgatgaacgaggcaagggctattgctaccaagcgcatgtgtgacgatgcacaggccatgggtgcggacgcggtggtcaacatccgctatgcttccagcgctgtcatgcagggcgcggcagaggttatggcatacggcacggcagttaagtttgtggaataggcatacagccagggataaaatataaaggacgcataacactttgatttcatgttatgcgtccttatttattcacatcaggttaatatccttttcgtccatccgcattttttccaatcgcttgattcgttcatccagatggttctccgtcagataacgatatacgcttttgggtaccagatgggcccattcctggtcggtggcgatgcagcttctgatccaggaggcggtcacgcctttttcttccggcgcctttctccacaaaacctctacgtccagcccaaggcttcttaatatcttgtatttctcctcgtcccattcatcgcacagtcccatatagtatacggcctctttgggtgcatactggagaatatactcggggcagctgattgggaacggaatcacgtcgtactcggattccgggacccgaaactcctgcatagctccccgtatcatctcatagcgttcaaaataggtaagcgggttggccgatttggccgaacggttgatatcattgaccgaatccctggtatgcatgctgtctgggttcgtaatgccaatgtataatttcctgcagcgcatcttggcagccaggatatactccatatgcttcaagtggagtacctggaatcttccatgtattactccggtttcaatcatacgtattctccctttttcgggtaaaagcccctcttagattcatccttattattgcacttttagtatactctgatacatcttttgattgcaagcactatttctggttggcaggctccactgctacggactttcctttgatcttggcatgatccatcgcattcaggatatccctggcgtattctcttggcacctctacgaaggtatacttatcatacatatcgatggttcccactaccttgcccggcaatccgctctctcctgccagcgcgcccagaatatcgcccggctttgctttatgcttttttccaatattgatgaacagtcgtaccattcctggctcctctgctcctgtatcctcgaacatatcttcaccgtcttcttctttggttcctgaacacagtttcaaaagcgcggcggcaatatccatgctggtatagtctgaatcgtttacttccgcctgaatcatctggaaatacgtggtaagatcctcttcctcgataatccggttgatggtttccatcagcttatccatcttagtattggcaacatcgtcaagagacggcactttctgtgcatatatcttagtcttgcagtatctctggatttccttcagcttgtatacttccttgccggtaacgaatgagaaggaacggccgacacgtcctgcacgccctgtccttccgattctatgaacgtaatactcatcatcctgcggaagatcataattgaatactgcctctacttcttcaacgtcaatgcccctggccgccacatctgtagctaccagaatctctgtcttcccttttcggaacccatccatgacgcggtctctctgggcctgcttcatatctccgtgaagtccggccgcaaaatagcctcttcccagaagcccatttaccagcaggtcaacctgtttcttcgtattacaaaagataacggaaagtttcggattgtaaatgtcgagaagcctggagagcacttcctctttattcttcggctttacttcgtaatagaactgttcaatatttggaaccgtcagttcttttttggtaaccttgatcaattcagcgttcttctggaatctcttagtgatatccagaatcggctttggcatggtcgcagagaaaagaacggtctgacgctcttcgggcacgccttccagaatcgtctcaatatcttccctgaatcccatgttcagcatctcatctgcctcgtccaggactacggtatggacattctccatctttaccgtctttcttctcatatggtccatcacacgtccgggtgttccgataatcagctgcgtaccgctttttaatgaacggatctgcttaacgatctcctgtcctccatagatcggaagcaccttgatcgcatgcatatatttggccagattccggatttcttccgccacctggatagccagttctctggtagggcacaggacgatggcctgtaacttcttattcttgggatctatcttttccagcaggggaattccaaatgccgccgtctttcctgttccggtctgagcctggccgatgatgtcttttccctccagcatagccggaatcgccttcgcctgaatcggtgacgcctcttcaaatcccatgttctttactgctttcataatctccgggcataatcccagatcttcaaatcttgcttcttccattaattacatattcctttcaagtctcaaaaaaaatactctttacctgaacccaagtaaagagtactcacacagtttcctttgctatgataccatatttgacttgattatgtctacttcttttttcggaaaatatggaattccctgcacccggctgtctgcgctggccagaagatacaggctgcctttctggattcccatacgtttcgcgataaaattctgctccagctggacatgccggatcttctcataagacacataggataggcagcggcggaaatagccgttcgccaggactacgcatttcttgcccacggcaaagcctgcggtggcataccgaagcgccatcaagaagatcgttaaggcgatgagccctgccattcctgcccctatccatcctctgtagcggggcagcaactctgctaaggtccccgctacgcctgccacggccgcgcagtaagccagcagaggcatcatccaggctgccagggtcccctttggctgtctggataccggcattctgaccgcatcttcaaattccggcagaagactatgcagcttagcatccagcgcttctttcttactgtagagcagcaggaaggactgcttctccgcttcgtcatctcccatcccgacgttcacgatctccgccatatatctgtgtgacatccgtccaagaagcgactgggtcagcttcaatgcattgatcttgtccaccggtatggtataacttacctttttcaagaatccgtaacgtatatacagccggtcttctattctctttactttgaaatcatagtatttgacaaatcctttgataatatcccacaatgctgacataaatacggtggccatcaccagaatgctcgccaggattcccataatgctttttccggcgaatccctggcccagcgtatccgatactacttccgccatgccgacggcacatcccagaagaatcagcagagaaaacaggttgatggaaaatagtccatggacgaccatatctccaagggacgcctccacatcatactgcggctgccctgcatccgccttcttttcctttatgctttcctccccggatgcttccatcagatccataagatattgacgaagcgactgtgcatcctctttcttaaggacaatcgtaacatccgtcttgttggccgttgtcatgctgtttgtatccagttttatcttgctggtccccgccagcatctcgaataggttccgttccatattcacattggatatattcttgatccctatggtatctttcttccggttaagcgtatttctctcaatcacgatggtattgtcatagatggaaatataagtcttcgaccagacgatgaactgccaggccgccccaattgccagcagcaggaggatcgcgccgcaagcaagcaagataactttcgcgtcttttgcatccattcccgaactattggccagagcctttacattctgcgccaggccgctgatcgcggcaacaatgactaatagcagcacccgtcccaggcgttctgccacaatagaaatatgatttcggaatcttatgttattctccatcttcttccccatcctcttccctctggctgacaacgatctcgttgattctgcctcttaagttctctgctatctgttctgccttctcttcctccagaaaccggatcgtgacatcgccgcctgcggtggtcaccaccacctttgccactttgaacatctggtctatcggccctttcaaagtctgcagcttgtggagcctttctataggaactatattacgctttacaaacaagtatccttccttgatatcaatgcactcttcattaatactgtaccggtatctgtgataccggaaataggggctcgccagcgcgtcgaataagatcaggatcataagcgccagggacactgccttcagcatatccatatcctttggaaatatccacagccaattgaccgccccgatcaccgcaagcgcgatcacgctcgcaagcgctgttgccacgtacatgcatcccagtgcccgttttgataacttttcatacttcatacgaatactccttctgtctggtatattgtggatggtaatattgtaatgtatctgtccgtattaatccagaaaaatttttgttataatgttcttattacaagttcaaaggcaactgctcgatcaagacctggctgtgccagatcggcaagaatacctacctgtcacatctgtgagcgggctgtgcgttccatcaagcccctgaaacgcaaacttacctccgggcatctcattatccttagcctggtcctgctgctgtttgcagcggactatgtatggtcccaatgcctggctccctggatctattccgttcctgccgatgatgtccaggttacagaactttatgaacttaagaatggggatcaggatgaaatcagttttatctttccgaaggaagagaaaagtccttcttatgccgcccagtatacccactcctgcgcctccatctattatagaggcaaatctgacgatgaccagcttatgatctgggaagaaggacagaaggtcggacctgctcccagagagattgaacagaaagtcaaagaagagtacaagaattcacaggaactcgattggggaacattcacttaccctatgacactagagccataaaatagcaagatatcattttattcttgcagcgcttccttcttatgctatacttaggataaaatcaatcatacgtagaaagaaggatgttccatgctcacagagacagataccactatattgcaagaatccctccctttctgggatcaacttaacgacaaccagaaggaactgcttaagtccggctcttccctcatgaaatacgctaaaaacagcaacgtgcacagtgacaattcgcagtgtgtgggcatgctactggtcaaatccggttctcttcgagtatatatgctttcagaggaagggcgggagattaccctgtatcgtatctacagcggtgaagtatgcgtcctatccgcttcctgcgtcttaaagtccatcacgtttgatgtatatatcgatgccgtggaggcaagcgaagtcatccaggttagctccgcctccatctcatccgtcatgaaacagaatatttatgccgaatgctttgcgtataagatggcaaccgagcggttctctgatgtaatgtgggctatgcagcagattctctttatgagttttgacaggcgccttgccatcttcctgctggatgaggccgcagccctgcattcccaagagatcaagatgactcatgagcagattgcccgtctgatgggaagcgcccgtgaggttgtcacccgaatgctcaaatacttctcaagcgagggttatgtagagctttctagaggaaccgtaaaaatccttgataaaaataaattaaaaaatcttgcctaaacccttgaccttaacgccgcgtaaacagttacactggctttgtcaggaactgaccaaaggaggaagtcttatgaaacatggctatacggttacccagctagctgacattgccggcatcagctcccgcacgctgcgctactatgaccagatcgggctgcttgtacccagacgcgacccggactcgggctaccgcatatatggcaagcaagaggtagacgtgctttggcaaatactattctacaggcggatgggactggaactttccacgattgaaggaataatcaaggatcctgccttcaaccagctggaagcgctccgggcacatcttgaccatttatgcaaggaagagcagaatctaaggcttctgattgaaactgtgaaaaagacgattcaaatggaagaagggaagatacgaatgacagatcaggaaaaatttgccgcactgaaaaaggaattaatcgaagaaaacgaagagaaatatggaaaggaaatccgcgaaaaatacggtgacagcacgattgagaacagcaatcaaaacatgctaaatctaacatcaaaggagtattatgccatgaaagaattagaaggaaagatcctcgcggcgctgaaagacgccgtaacttccggcgcgtctgcgtcagatgccgtcggcagggatattgccatgatgcacaaagagtggctgtcttacacatggccatcctatgaccccaaggctcatctggggctggcggaaatgtacgtggcggatgagcggtttcaatcctattatgaccaagaactcccaggatgcgccaagtttctgcgggacgccgtctgcgcccacatagcatgatggtatagactccaggcgtaatacaacgacagacaggcagcggtataggttcccatagaagaacttcctgccgctgcctgtattatgtccattttaaacaatctgccaatcttatatccgaattctttattttaacatctctaatatctctgctttggactttgcccctacttctcttttcaccggcttgccgtctctgaataccataagagtcggtatcgacattaccctgtactctttggccagttccggctgctcgtccacattcaccttgcagatcttcgcgtctttgacctctcctgccaattcttctatgattggtagtaccatctggcatggtccgcaccaggtagcccagaaatcaaccagcaccggctccttcgcctgtaatacttcctcgttaaatgtttcctttgtcaaatgagttgctgccatatctatcatcctttctttcattgtactctgtcgagtatttgtttgctttgatgattctattataccctatttaaaaagaaaatctgtgattcagtcacattttgtcaattttatttacaatccactaatacagaaaaaaatgttatattagttgtaacgaatcaagcagtcatgcgtctaatggacaagcgaggggaggtgacggaatgaaactggaatttgatgaaatatataagcgctttttcaaggatgtgtatctgttcgtgctttctatgagcaaggatccgcataccgcggaagagattacccaggatactttcttcaaggcgcttaaggaaatcaagcatttccagggaaactgttccgtcaagtcctggctgtgccagattgccaagaatctatacatctcctacacgcgcaagaaaaaggcggtccatacggacagtcttgaacagtttcccgatgactcggatattgaaagcatgtgcatccgcaaagacgaagccctatcgatttataagattctgcactgcctggaggaaccttataaagaggtattcatccttcgcgttctgggagacttaagtttccgggagatcggtgaaatcttcggcaagcaagagacctgggccagagtcacttatcaccgtgccaggctgaaaatcaaggaggtaatgatatgaataagacagactgcgatataattaaagatctgctgccgctttatgaagataatatctgcagcgagaaaagcaaagacctgattgaagagcatcttatagaatgcgaagactgccgggagtatctggattccctccacgaagaactgccgcctattgagccttcttctgaggacgcggtcatagacgagactcgattcatcaagcggatccagcgcaagatcgcgcgccagaaattgctggcctgtggaatccttctgctgacagttctggcattctgcactatctgggataatactctaatcggcgaaggcatccaaaaactgcctttatttgacaagcgtattgctgtcgattacatcgagccaacccagttataccggctgaaagacgggcgcatcttctgtacgcttaagagcgagaagccttttagcatctcatcctactggatagatgtatcacccaaatattatgaccagccttgtgatgacggcaagacgatcctttcactggaacgatccagatgggaggaattctggtccagcagcgcctctttcacggagatgtcttatgtactgccgcttaaggaagaagtggactctgccgcctccatagatgaagagaaccaaaccgtaatccattacagcacttccatctattatgaaggcaaaaaaggcgagcggaaacttatctggaaagaaggccagaagatcaaggatgcccctctgtctgttgaaaagagagtcgctgctgaagaaagcggaaagccaaatgaagactatggcccggaagaaaatgtgctcatctttgattttagagaatagtaaactccagccaccagaccagcgaactgttatcccgcatctgtatacacagaattttaatattagttcataaaatatttcttaaaattcgcctccattttatgctatacttagacaatagcaaccccgagtatccgtattaaggaggtgcaatatgagatgggaagaaatactggcaggcaatgtcactactttggatgaattatcagcatcgatcccacagatcaatgaatatggagatattgcgtcaaaagtgctgaacaaatatcctatgtccattccacgttactatctgtcccttgtcaatccagatgatgccaatgaccctatccggaagatgtgcattccctccttcctggaaatggatcttgccggcacattcgacaccagcggcgaaagttccaatacaaaactgcagggactccagcataagtatccgcaaacggtactgatgctttccacgaaccgctgcgccatgtactgcagatactgctttcgcaagcgtatggtaggaagcggcacgcaagaggtcgtggcagatatcaaggaggccatatcctatatcctgaaacatgaggaaattaccaatgttctcatctcagggggcgattctttcctactggatacggacatcatccgggaatacctggattctctatctgctattggccatcttgattatatccgctttggaaccaagacccctgtcgtcttcccacagcgtatactggaagatagcagattgcaggacattcttcgggaatatggacacaagaagcagatctatatcgtgacacagttcaatcaccccagagaattaacagaagattctataagtgccgcaagatgcctgcaaggcctcggcctgatcgtcaaaaaccagacggttcttttaaaaggagtcaatgactgtcctgaaacacttgcccggcttttccggcgcttcacagaacttggaatcattccttactacatcttccagtgcaggccggtgaccggtgtgatgaaccaatttcaggttcccttacaggctggctatgatatcatagagcaggcgaaggccatgcagaatggcaatgggaaatgtttccgcttcgttctgtctaatccggacggcaagattgagattcttggacggaccgctgacggacagatggtgttcaaatatcatcaggccaaggatcctgataatctgggacgggtgtttcaaagagaggttgggccggatatctgctggatcgagtagaaatgtcaaaaggccgccatctacataaaaaacgtgccggaagcatgtgcgatacacatgcttccggcacgtttcctactctggaaaatactctttcagatactctcctaccattctgaattcatcttcatatatgcaattcggaagagttccttcccgaaccttttgcatgctttcttcgtaatccatccagataacttcttctacttctgactcctgcagagtcagttcctctatatctacgggctctatatacacatagaccgaactaagttcgttatcccggaacatcctgccgtagaatacatcttcaaaggctccatgatgcacgcctacataatgcagttcttcttctgacgccgtaatgccaagttcctctttcatctccctgattgctgattctatcaccgtatctcccgaagtcacatggcctgcggacgagatgtcatagcatcccggattggaatccttgcaagcgcttcttttttgaagcagtacgtcatacccgctctttaggttctttcttaccacccagatgtgcgcagtggcatgaaggcttccttcccggtgggcaacgcccctctctcttacgattccagtcttagagccgtccggattaagtatatcgaacaattccataggctttccgttcaacgcggcagataccagcttttcttgtccgtcataaaccagttttaaagaaaagaaatcctcttcttcatccatcagccggaagaagatcttgtccccttcccagatatttaagttccatacatcttcaatgtccacccattccaattccccctcatcacatggaatcggctcgcctataaagccgtccgcggtaaacagggacatgtattcggtaaccccattgccggatacgaaagttacaagccctctgtaacggtaggacgtaagcgtgtacccggtctcttcccatacttctcttagcaggcactcttccgggctttcatcctgttcgaagtgaccccctacgccaatccatttatctttatttacatcgtttttctttacggtacggtgcagcatcagataacgcccgtcctgctcgatgtaacatagcgtgcttagtttcatctgtttcctccttaatttccaagagaagaatacccggttccaaaaccatctatgcttcactggaacgatctccagcaactggtctgccatagaacgcgagagcaattcattctccttcaggaaaactgccagggttctggcattttctttcagaaccctgtccccatactcatagacgaatacaatttcctcttagcctatatattaacatcaaactattaaaaaatcactatttttgcactttttcctcatgaatcgcgcgtcttttatcatgctgaaaacaactttttaaattggcaggctatctcttacgcagagcgccccatatcccacctgaggattgggatactgggtgaatcccggcagaggccttgcgccgcgccttaaataggcctttactttctccccatacaggtaattatcgttgccccttacaattccccactccatcagaagcgccgcgcctcccgtcacaaatggcgtcgcaaaggaggtcccggtaaactgtccgtagcctcctccgaccatgacagaggtgacacttactcccggcgcaacgatatccggcttcaccagctgctgttcccgggtatatccccttccggaaaaatcagcataggaaaatgtcagcgcattgtaggcgcccactgaaatcgccctgctggcagtagatgggatcgtaagcgttgtgctgtccgtcggaaataaaaagccggttccctggttaagcacagattcacttggaagccacatttcaaattctccggatacgatacgccttggagacagtacaatctgccagatgccccctgagatatacccgtctcttggaatcatatcaatatagatttcctgggacgtgctgtaagggctgggctccccataatagagcaggatttccgtctggcctgtcgtatatctttgagggcccaatatttccttaaatggccctaccgccactccggaagggttgacgatggaaatgtccaccacgtccgtgtattctttccatatctgtatatttagcgctggctggctattctgtaccgccagctggataatcgtctcctcatcttcccggagcatgccggaagtatggcccgcgctcgccgcctcattccctgtcccgatacagatgctgttcttccagatgttggagatgtcgtcaataaaccgttctaaaagcgatgtcccgtcatgggggccgtatgtatttccaaaactgatattaatcgctaccggcatctgaaattccagagattttcggatggcataatcaattccctgcatcagttccgtagtccgtggaaatccctcctgcctgggatttccaagtttcaccaccagcaactggctttcagaggcaacgcctgcatactggccgccgctattccttccatttcctgccgcgattcccgctaccgccgtcccatgcccagaggtatctacgcttggaaccagtcttcttcgctcctgcacagtcggctgtctaagcgcctcgttaatctgctcctgcgtatattccgcgccaatggcgtatccttccggcggcgtccttccctctcctggtgccagggactggtcccacagcgcccgtattcttgttgttccatccgtctcccgaaaatcctggctggcataatcgatcccggaatctatgactgcgacaagaatgccctgtccatatagcgcaaagcgggtatcctgcaccgaatcgatacaggatacccgtcttccgtttgcaacttgaaagaacagccttttgggcttctcaatatattctacttccaccagctgcgcaagttcgtcaatcctggattccaggatggtaatgattgcatattcgttcaacagttccacgacttggcttgccagggctctcacccgttctaggcttcctgagtatttgatgatcagatcccattccctgtcaattggattatatcctacatccaggtccagagatttctcccgttcttcttccgtggcatctatcgccagatttagctggtcctcaatcttctgacttgccatgcaatcccttccttacatacaatattatttaataaactcgcattcaaaatatggagccatgcttgctggtataaagtatccacgttcgtggcggcataccgggcatacttccggaaccagttttcccttatgaatatgcccgcagttcaggcacatccagtactcatcttctttgctttcaaaatactgattgttctccagcatgcaggccagtttgccaaaccgctttgcatgcgtctgctctacccttgcgatctggtagaacgcggatgccacttctatgaagccttcttctttggctacatctccgaagttctggtacacatcctcatactcttccatctcgttatgctctgcggctttcaacagttcgctcacgctgtcaaaatggtctaccgggtagcctccgtcaatatggatggttgttcccgaaaggttcttaagcagatcatagaagcgctttgcatgagcgcgctcttggtccgcagtaaagagaaatacctggttgacggcaaatagtccctgttctcttgcaacctcggctgctatcgtatagcggtttcttgcctggctctccccggcgaatgctctcatcagattctctcttgtcttactttctttaaaatcaatagccatgtcacacactccttttcattattaatagtagtatgtggcatggctgccagattatacatatttaattaaatccaataattcttcttgcaaccgtataggccagcgaggagatcttcctgcccgacttgcccgggatattcatggtctgccccaggattccgtagcggatcttaatgtaggtcttcatatcccgcttcttcagatacagccacaattcctttttcttctccagattctccttctcctttgaacggatcaaaagaatcgaagataccgtcatcatgattgccaggtaatttatcatatactgcctcagcttcttgctggtcacctttttaagctggtacatgtctatcatagtcttggttacgaatatctgctggtccacccttgcgatcatcaccttctcattgacggactggtcctctcttccaataaagtacctgtaaaaatccacatccagatagtatatcttgcgtacatgaggaaggggatagtatacatagatgttatccacatagaaggtatgcttcggcagtctcatctggctcagtttgagcatgtccgtccggtatatgacagaatgcatcagaatatactgatccagcctgaaatgtccgatatcatcccagcggaacacctcgtcctgcggaaggacgttcctgtaatgtatgcattttttatgggtgacccccgctttttcatagacatagttggaaatcagcatgtcaatctgctcattgtcctcctccagatggcgcagcagcatcaatatcttatgcagcgcctcctcatccacccagtcatcactgtccacaaccttaaaatactttccactggcattggcaagtccggcgttgaccgcgtcgccatgccctccattctctttatcgattactttgattatatccggatacttgtccatgtactcatgggcaatctgcgaagttttatctttagaaccatcatttacaataataatctctacctcatccccgcccggcaggatgctttcaatggcatgggccatgtaatcctgggaattatagcatgggatagcaaatgaaatatacttcatcattcttctccttttcttcgatgaattatctatctagtataaatcatttcgtaagattttccaaccgcttcttggtaaaatatctccttattgattgtaaattccctttacatccgctatagtatttggtataggaagaactaggaggaattcatatgacaaaaaatattatcgtcggacaatcgggcgggcctaccgccgtaatcaatggaagcctgtacggagtcgttgcagaaggacttaagcatcctgaccgtatcggccgcgtatatggaatgatcaacggaatcgagggattccttcagggacatatgatggacatcggctctttagaccagacaaacgaactggaaatggtacgcaccacgccaggcgcatatctcggctcctgccgctacaaactgccggaaagcctggaggatgcggtgtatccacagcttttccagaaatttgaggagcttggcatcggctatttcttctatatcgggggaaacgattccatggatacggtcagcaaactgtcccgctacgcccagactatcggcagcgatatccgcttcattggcgtgccaaagaccatcgacaatgacctggtagagacggatcatacgccgggatacggaagcgccgccaaatacgttgccaccgtagtaagggagatttctgctgacgccaccgtctatgacaacaagcagtctgtaaccatcgtggagatcatgggacgccatgccggatggctaaccgccgccagcattcttgcccgcaaattcgagggggacaaccctgtgctcatctatgtgccggaggttgcctttgaccaagaggcatttatcgccaaggtaactgaatccttgaagcatacgcccaatctggtcgtctgcatctcagagggaatccatgacgaggatggcacttttatctgcgaatactccagcgaagtaggaaccgataccttcgggcacaagatgctgactggctccggcaaatatctggagaaccttgtcaaggagcggctgggcgtcaaggtccgctctatagaactaaatgtatgccagcgctgttcctgcgcccacttgtccagagtcgatcttgacgagtcagagaatgccggcatatttgccgtgctgtccgcccttgcaggagagaccggcaagatgatcaacttcatccgtaacaaaagcgttccttatgaactgtcgtatggcactgccgatgtcaacatcatctgcaaccaggagaagaccgtgcctttggagtggatcattgcggacggttccgatatcagcaatgaattcatcgactatgtgcgccctctgacccaaggatttgtagaactgcctaccaagaacggaataccgcttttcgcttatagaaaatagactggtataagaagccccatgccatcgtatcctgatcgtggcatggggctcttttacgctaaggctccgtgctggcatttacgggattctgcttttctattatctttcctaccaccgccgcggttgtctctgggatccccgcatattgttcatagtttgttcacttatctttcaaaaaaccttcatttctttaacatcgtttcttcataggtctgctttatactgaatttatcagatgaagaacaagacatctgaacattagataagaccattgaccaatagtaaaatactatttttgaataaactttttcataatacatgccggggattgaggaatcaatcacccggcatcctcccttttataaggatctctatcgccaccttccctatttcataagataaagaagccccgccacctgttaacggcagttttaatttacctgggaatcaaaggcgcggcaagccagcacactgcccttcccttttttgaatccagcagaagctgggcattacagtctgacacatcataagctttaattatccctcccagttcctcatttccgggaaatagttccgggaatatattcggatgctgcttcagcagccggggctgatagcatctggtcttgctgttctcgttgatcgcaccgtaatatacgtcagcctccacaagatcctggaacatatggcttccataagacagttccggatgatatcccacttcgctgtacgctacctcgcagatggcgcagaatgcactgatgttggcatatactaccggaactcccagttccggcgatgaagttccgatacgccccggaaccagaagcatcatcttcttatctgtctcttcatagtggcggttgatctcatcaatcttctgtgccacgtggaatttcttagcataaggatattcgtaatatttcctgggatccacccatacgataatatccagtttctccatcttggagcggcgcatggaagtacggcgcacgtcgaagaggaactccttaactttctcttccggaatgtggattttctctgatatgctggcctgaagaggcctgcactgcagaagattcagctcccactctccttttgccatgctgtttaccgcaaattcaacgtccaccggccttccgtatacttcctgcagcatgccaaggatatcctttaccatctggataaagaggtcgttattcaccatcccctggcagtcggcaaacaatacctgcttatactttcctctctgggccaacagttcttcggcttccgtatcatggcttagcaccagtttcttctgccacccgggaagttcgtctatcacttcttccaatcgtttcgtgcacagggaattggatgcataatccatcacgtctacattccgctgggaatatttgtgccgttcagccaccgttgttcgaagattggcctgcgcccggtcaaggcctaccaacctcggataatctcccggcgtacgctctaccgcgcgcgtgccaaggcccatgaccatccttatcattcccgcgtccggattcatgttctccatccatttataaggattataggagcaccccatgcccgctgccacgggcatatagaaactgtcgtacctctgccctgccaccttctgtatcagcagcgccatctgctcgtccacatccagcagcccccagcgcctccggtactcgatggccgagggattcatggtgcttgcatagacgcttcgtacggcattcatcagatcggagagcctctcttcctcgcttccctggttgatgcagaagatggattcatatttgccggaaaaggcgttgccgaatccatcctccaggaaactgctggatctgacgatgatcggcgtatccccgtaatgccgtaccactttgagaagttcttcctgtatggcttcggaaaaactgccgttccggatacggctttgcagttcatccgcctcttggaacttctctttttccttcatatggcgtcttcttaactccatacagtcattctcttccagataatgatagaatacatccgagcccacaaaataggaatcgtgcggctccatataatccatgtattgaggcatcctcgcctggatcagttttctcgcaagaagaagcccgcacgctttccccccgatccggcctcctccaatccggcgctgcgccaccttatagtagtcttcagggccaaagttttccacgatcaggcgttccatctcaagccccgtactcatcagatcattgcatatatatttgctctctttcgctgtcaggctctccctgcttctgatctcttcccagttcatatgcctgtacctcctgttcttatgagataatcaaatgcctatacctcttatacatatataggtatttgtttttatcataccattttatctataatgaaatcaagaaaacaaagcacccaaaggaggaaagggaagcatgaaccaaccagtaaacagcgccgatgcccttgacgagttaaaactacagtacgaacaagccaagacccaaaaattaaacctgaatatgtccagggggaagcctgcgccttcccagcttgatctaagcaacggattgcttaaaaccatggacacttacatcaccgccgatggcacggatgcccgcaattacggcatcggggatggcatcccggagtgcaggaagcttttcgccgatcttctgggccttcagcctcagcaaattatcatgggcggaaattccagcctgagcatgatgttcgacaccctggcatccatgtgcctgttcggcaccggcggcagcaccccatggcattattacagattccagggcacgcccgtcaagttcctgtgtcccgcgccaggctacgaccgccacttcaggatctgtcaggaacttgggatcgggatgattccggtaccgctaacttcggaggggccggacatggagatggttgcgtcgcttgcaaagaaggatcccttgatcaaaggcatctggtgtgtgcctcttcattccaatccggaaggcatctgctacagcgaccaggtggtagatcagctggcatctatggaaaccgctgccgacgacttccgcatcttctgggacaatgcctatggcatccaccacatctacgagaaggtggaacttatgaatatcctggaagcctgtgaaaggcatcaccatccagaccgggcatattatttcttctctacatccaagattacatttcctggagccggacttgcgctgattgcatccaattcctcaaatgtagcagagataaagcggcatatgtccgcacagatcatcagttatgacaagatcaaccagctgcggcatgtacagtactttcagacgccggaaaacattctgtcccatatggaccggctggcacaggagttaaggcccaaattcgatctggtactatccaaactggaaaaccagtttggaggaacaggactggcttcctggagcaccccgaagggcggatacttcatctccctttataccccgcccggctgtgccaaaagaacggtggcgcttgccaaggaagccggagtcactctgacggatgccggggcaacctatccttacggaaaggatgaagcagacaggaatatccgtatcgcgccgtcctatccaacgcttgaggaactggacgcggccatggacatatttatcttatgtattaaaatagcagcattggaaaataaataaaccaatataacaggaggaaatctaatatgagcaagacatataacccttatgataacgtattaaaagtcgtatccgaagcagccggcatcctaggctattcagacagtgacattgaagcattgaaatacccggaaagagaactgaaggttgcgattccggtgcgtatggatgatggaagcacgaaggtattcgaaggctaccgtatccagcactccacttcccgcggacctgccaaaggaggaatccgcttccatccggatgtcaatccggatgaagtaagggctctggcagcatggatgacgttcaagtgcgcggtcgtcaatatcccttacggtggcggaaaaggcggcgttgtctgcgatcccggcaaactgtctgaagatgagattcgtgcaatcacccgcagattcacggccgctatcgcgcctctgatcggaccggaacaggatattcctgctcctgacgtaggaacaaacgcagctgttatgggatggatgatggacacctacagcatgctcaaaggccactgcgttcacggagttgttacaggcaagccgatcgaacttggcggagcgcttggaagaagcgaggctaccgggcgcggcgttatgttcaccgtcaagaatgtactgaagaaaaaaggaattcctgcacaaggcaccaccgtggctattcagggaatgggaaatgtcggcagcgtgacagccaaacttctttatcagggaggattgaaagtcgttgcggtcagcgacgtatccggaggcctctataagaaagaaggcctctgcatcccgcagatactcgaatacctgtccaaagaccggaagaacctgctgtccggatatcaggaggaaggcatcacgcgcattagcaacgctgaacttctggaactggatgtaaaacttctgatccccgctgccctggaaaaccagatcaatctctccaacgccgaaaagataaaggcggatatcattatcgaagccgcgaatggcccgactgcttccgaagcagatgatatcctgaagaaaaagaatatcatggttgttcctgacatcctttcaaacgcaggcggcgtcgtggtatcctactttgaatgggtacagaacatccagtctgtcaactggacagaagaaaccgtcaacgagaaactcaaagacatcatggattccgcctttgacgccgtatggaacattgcggaatcaaacaacgccaccttacggaccggcgcttacctgatcgctgtgaaacgagtggtagatgccaagaaagcgagggctatctggccataaaatacacccttctcgctaagcaaggggcctgtcaagcgcaggcccctcgcatcatatattcattcccttcaagtctggcaagacatatgcctgatttgtcagccaggtcttttacgagtatacaaatcatggtacaatataaataggtagaaacagggaggatatctgagatgtttaattctatgaactatgtgtatgaagtgtacaaagagcggagtttttccaaggctgcggcaaacctgtatatcagccagccatccttaagcgccaccgtcaagaaggtggaagagcgcataggctcgccaatctttgaccgcagcgtaagcccgatacagttgacggaatgcggccggcattatatcaaggccgtcgaagagatcatggatacccagagccggttcgcgaattatctcaatgacctgaatgaactgaagacaggccagatcgcaatcggaggaagcaatctattcgcttcctatatccttcccccggtaatcacctgcttcaccaagaagtatcctctggtaaaggtacatctggtggaggcgaatacgcctcagctggtggatctgctgttccgaggaacactggatatggtcattgataattcctcattcccggatgcgatctaccatcatcacctatatacccaggaaacacttctcctggctgtgcccgcgtcttttgcttccaatgaaaaggctgcttcttatcgccttacgatccaggatgtgctggatcgcaggcatgtgaaagaagaaacgccctgcgttccgctttccctattcgaggatgatcctttcattctccttcgttccggcaacgataccagatcccgggctgaaaagatctgtcaggttcagtcattttcgcccaacattatcctgaaactggatcagcaggtcaccgctttccatatctgctgctatggaatgggtgttacatttgtcagcgatctgcttcttgcccacattcctaatggagaggactgctactattacaagctggatgcagactatgccggtcgcagcatctatttctaccacaaagagacacggtacgtgacaagggccatggaagaatttttaaaaatcgcttccaacggcgttaccacataaagaaatgccagatcatataacttcgatctggcatttctttatctcttttttttaagccactgttcctcatcggaatatggaataattggaagatagatgtaggaagcgtggatgctgtctacgaatatcttatattcaatatcctggctgtttggcagccgaaccatccagtgatatggattcgcgtatggtctttatcgatctcctccttcatcaaataagtgatttcttttaaagacagtcccatctccttcagaccggattatcgcaagaaaaagccgttctttttcctctttttatagtaaattaacactgtaattgccaaaaacaggataaaaatcatgcatattattggccattttttgggggcttcatccttcctctccttatcatctgccctcagtttcttttctatcggctttaccagcctttgaaataccgtttcctttggcgacacctggaactgtatatggccgacagcctgattgcccgcatagtcggatgccttgacctcgatctcataattctttaaatcctgtaccgtaaactggtaaatcctgctccttttattcgtcttctgcacctccccgttaatctttatctcatcaatctgatcctcctgatcttcgagggttacctgaaaagtcttctcttcctcgtagtccttcccgtcttccacgtcctgaaacactacctggggaggggtatggtcgatgacaaatctggccttcgctgtacctgtgttgccagcggcgtcaatagccttgacttccagggtatgccgtccttcttccaggacctcctgccccatgggatagattcttccatccaaaagtatggtgtatgtataactggtaaagtcccgaatccattcgctggcaggataattccagcagaaacgtttcaggtactggttatccagacggtctacgtagcttattaacggactcttcgtatcaatgatgaaccgagccgccttccctgcctcatatccggccttgtccgtgcaggacaggctcaactgatagatgccgtcatcagccagtacctgtctggcacatttcccggattctgtatccgaccattccgataccggaatctctctggcatttccttgcgggtcttcccggcggacccatgccctcatatcttcaattacattttcctcctctacaaggtatcttaccaccacaggctggctggtaatcatgtaatcttctatcccctctatcctggcctttggcggcagccggtcgatgaaaaggccgcaagaacggctggccgtattccccgcccggtcccttgccgttaccgtaatcttcacagcatttcctttggcggatgcacaagctacctggaaggcggctggcagttccttgctccttcccaccctggaattgccagaagcgcaaaccacctcttcaatctggcttcccaactccccgtcctctcctgttaccgttattgataccgcctcctgataccatgcctcaaatccccggggcgccccaatccaaatagcaggcgcctgcgtatcaataaggaaatccttatccaggctatactcctccacctgcttcccttctccatcttccatccagatcgacagtctgttgattccttccttaaactgctccccttctatcctggccgcaccgtctttctgtgccagttccccttccctcgtctgtccttcgctgtcggcaaatttgtattttgtaactcccgcctcgctcacatgcgtaatctcaacttccggcttcgtaatatagtatccattttccccatcttccggcggaatggatacctgaaagcactcgataggctcctccggaggctctggctcttccggaacctgcggatcttctggctgttctaatgccccgggggtattcgacgccttcgatgttctcgtttttgacaatcccgattttgacgtccctgctgcctttgggacttccgcatgcagaattgacgactgctgccagtatatcattcctaatacaatgaccaatgctaaaatactctttaatttcctatccatacttcttccccttccactcgaatctcatattccttctgcaacttctgaaactcttctttctcaagaatctctggcatcctgccaatatattcccggatcgtctggacgcacagttcccggctgatggctgtatccttgcacaaaagccggatatgcaggattcccagatcctttgaatcttccagttccccgacgccctttatacaggtattaagcgccatctccttctgcccgcatgcctcatagaggactgccatcttcttgtatacttcttcccgtttcttctcctctgactctaattccaatatctcttcccagacatgcgccgcctcctcaaacgcgtccgtctgctcataggcgcttgccatatactcttttacttcctttacctcccggtcgtccaagccttcccgtccaagccattcttctcccagcctcagaatatttcctgccccgtctttggattccaagagactgtaacccttgatcagacatagatcacaacgatctttttgatctttcggcgcctccttttctagttcgagaagatgcttcttcaagtcccggcgtactcccgcggcttccccagcgcctccgcctccatccagcgcttttacgatggcttccatgtgtttggccggtgcatagtcatccgatatgagcgcaagatattcaaggctctttttataatctttcagttccaggaagtaagccattgcaagttccagatatgcttcttcgtccgctgcctcttgatcgtccgtgtctttattgaccgtgccctcattgaccgcgcttttatttattgatttcttttctgccatttctgttgcgggttcgtgggattcttccggcttgtaccctccccagagcaccgttgttgcaaccgcggcagatagaatggcagttccggctacagccaggatttttcttgcttttggatgggattcttttctttttctgtaagatgggatttgtctacgaatgtcagatatgtcttgataggaatgtttcgatgtgtctttcagacaccttgatataatcttatggaaccttgcctcttcccgccttttaagcggcggttcgggatctgcctccgacaatatatactggatcgtccttccaagcccgtagatgtccagtcggacgcttgccttctggtaataggcctgttgccgcggaaggaaatgctccctgattacccttctctgcataaatcttaactgctcttcattggacttggcatccatatccagaaaatgcagctggccttcctgcgtcactatgatgctgtaagggttcacataccgatagcagggattaccccggcatctgtgaatcagtcccaattgcctggtaatatcctgaatccactctagaagtctttccttagacagattcggatggtatctgagccagacagctaaagtgcacccttttacatactccgaactaatatagcaggattgtccatgctcaatcaggcgcaatacatcataaccttcttttgatgacaattacatcacctctttttcttgccttttcctttgtctttttgtagggaattaaattgatacgtcagatataaaagattcttttgaataattagagtaatacatatattacttgattccgtaaaaaaatacaagtgtttttgggaaaatttggggagttgtgaacgcaggggggccgggcgggggatgacgggatgccagcccgcaccccgcctcccttggccgtcctctaaaaccatctaaatattacccaaggttcctacttatgactcagttccttcggcgtatacaagtgccgcggaataccatctaccataaccggagatacgtctccttgaatcaaaggtctgacataagatataaactcgctcgtcacatacgtgccttccttgttcacccaatctcttggaacaagtttctcatcatttgcaatcttatgcacgtcttttacttctgttccgcactggtacggatcatcggacagtctctggaggaccaccatcttgccggaatctccttcatctgctgcctttacggccgcgccgcctacctggtatgcttccaggatgtccactctggaagcggcatgggatgcggaacgctgcagcgtgctgagttcgatcgcgcgggtcttgcagccgatctctcctgcaataaagcttgcaaggtatgatgcggttccggacagctgcttatggccgaatgcgtccacgaagtcaatgctgttgcccagttcgcatacataagtgccatcatcggtacggattccttcggataccgcaactacgatggacgtcttcttctccaataatttccttaccttatcgccgaatttcttaaggtcaaatggaatctccggcagatagatcagatccggcccctcgcagtcctcgccttctgacagcgctgtggctcctgtcagccatcctgcgttacgtcccataacctctacgatcgtaacgatgcctttttcatattccaggcagaatccgtcacggataatctctttcatggacgtgccgatgtatttggctgcgcttccatatccaggcgtatggtctgtcagcgccaggtcattgtcgattgtcttcgggcatccgatgaatctggttggatgtcctgtgatgatcgcatagtcggataacttcttgatggtgtccatggaatcatttccaccgatgtagatgaacgcttcaatatccaatttgtcaagtatggcaaatatcttgtcatatacatcgcgattctcatgaatctccggaagtttatatcggcatgatcccaagaaagcggctggcgttcttttcaataattctgcatccagctctgtcttgatgtggtctgccaggtcaatatatttttcctctaataacccctgtacgccatgaagcattccatataccttcttcgctccacggtcctttgctgtacggtagactcctgcaaggcttgaattgatagctgctgtgggtccgccggattgtcctacgataacatttctttccataaactagttcccttccttccttgaattgctgtagatattactattttagtatatttcaacataattgtccacaaaaactcttattttttatgcacatttaccgttgctaccacatctataccggttccggccacattctgcgctacgatatctcctatctgtaccggcgccttgaccgtaatattcttcaatgcctgcatgcaatccatgatccggtctttgggaatctctctttccgtcttaaccgacaccctgggaagttcccctccctccacctcaagcgtcgttgttaccgtcctggtcgggcttaaaacctctttctgggcatagacataccccctcatgcagcgatttcccgacacatccgacacctcatcctcgtctacaaggacctccagctggcagccgttgggacatacgatgcatgtcatcttcattttctccacctcatactgcctcctttacataatctgctgcatgctttcctgcctccgcagcctcctgagacacatggtccgccaggtcatgcacatggagcacgtttccacacgcaaatacgcctgccaccgtagtctgcagccgttcatccaccacgggtccatgggtcttttcatccattctggcccccagtcccctggtcagctcgttctccggaatcaggcctaccgacagcagcagggtatcgcagcgatacgcttcctgtgttcccgggacgggttccttgttttcatctacctgcgccagcgttaccccttcaatatggtcttttcccttgatatcgatcaccgtatggttcaatttcagtggaatcccgtaatcctccaggcactggacgatattccgggtgaggccgccggacttcggcataatctcggccaccacctttaccgtggccccttccaaagtcatgcgcctggccatgataaggccaatatctcccgagcccaggatcacgatctctttgcccggcatatagccttccatattcaccagccgctgggctgtcccggccgtatagattcctgccgggcgaaagcctgggacattaagggctcctctggggcgctccctgcaccccattgccaggatgaccgctctggcgcgaagcatcgtcattcccttttctctgctcatggctgtcacgatcttccatccgtcttcctgcgcaacgtctaccaccattgtattcaaccgatatgatatcttctgctccagcacctgccggatataacgccatgcatactccgggccggtcagttcctccttaaatgtatggaggccgaatccgttatggatgcactggttcaatataccgcctaaatccttgtccctctctaggatcaaaaggcgctcgattccctgatgcctggcattcagggctgccgccaggcctgccggcccgccgccgataatcacgatgtcgtattcttccatgccttttgcctccctataattcctctttgtcccggcccttaagcatccaggactcgtcagatgctttcctcacttccagcagatccgtattccattcccgtgccagaatctccatgacctttggagagcagaagccgctctggcaccgtcccatgcccgcacgggtccttcgcttgatcccgtccatggtcctggctcccagaggcctgtggatcgtgtctatgatctcgccttccgatatcatctcgcatcggcagataatattgccataggccggatatttccgaatccatgcgtccctcttttcaatggacatctgaccggggcgcacgattccttcccgccttgctatatagtccttattctcgggaagtttcagccgttcttctaccatgcctgccaccaattcgccaattgccaggcagctggacagtcccggggacgcgatccccgcacagtcatagaacccttcctctgcctcccctatgataaagtccccatccttttcatgggcccgcaagcccgcaaaggatgtaatcacctgattcaaggggatatcttttactgcccggccacactgttccttaatctttttaaacccttccctggtggtctggatgccttccttatcctggatatccaaagccgtaggccctaccagcagattgccgtggacggtaggcgtaaccagcacgcccttgccgtaggaccccggcagcgtaaatatggttcttgagacatggcctcctgctgccttgtcaagaagcatatactctcccttccttggaacaatctccataggaggcgaacaggccagattgtggatttgatcagcatagacgccagcggcattcacaaccgtccttccttcataagactggccggattctgtgtgcacctcatagcctcccggcagcctgcgtatccgatccacttttgcatgaaagatgaatgctacgccgttcatgcaggcattctccgccagcgcgatgttcaattcaaacgggcatacgatgcctccggtgggcgcataaagcgccgctacggccgtatctgaaagatggggctccatctgccttaattcgggtccggatacgatcctcagtcccagaacaccgtttgcaatgccattctcatagaggcgcttaagttccggcatctgcttttcgtctgtgcagaccaccaaagacccattccgtatgaatggaatatccagttcttccgatgccttatccatcatcgcgtttcctcgcacattcagccttgccttcatagtcccctgccttgcgtcatgccctgcatggacgatgccgctgttggctttggacgttcctgtgcagacatcctcgctgcgttccagcacacagatcttcccacgatattttgccagttccctcgcaatggcacagccggagaccccggccccgattatcactacgtcatacatgctctactcctcgtcctttgcccagtcaaatgcatattttaccgccttgttccagccctttatccttttccttcgttcgtcttccccaatcttcggctcaaaagtccggtcaatcgcccagttctttatgacttcttccttgctcttccagcatcctactgccaggcccgctaaataggctgcccccatggccgtagtctcaatgcagctgggcctcttcaccggcgcgtccatgatgtccgcctgagtctgcatcaggaaattattggcgctggcgccgccatccaccttcagggaacttaaggaaattcctgaatccgcctccatagccttcagcacgtcgtatacctgataggccagagattccagcgttgcccggataatgtggtatttattcacgccccttgtgattcctacaatggttcctctcgcatactggtcccagtgcggcgcgccaagtccggtaaatgccggcaccacatagcatccattggtatcctttactttctgcgccatatactctgagtccggcgaagaatctatcaggcgcagttcgtccctgagccactggattgccgctcccgcaacgaatatggagccttccagcgcataatataccttgccatccagcccccaggcaatggtggttaccagaccgttattcgagaacaccggcttctccccggtattcatcagcaggaagcagcccgttccatatgtattctttgcctcccccgcctgaaaacaggtctggccgaacagggcagactgctggtcgccggccgccccggcaatcgggatagggccgccgaagtaagaagggtccgcctccccgtagacgcagctggactccttcacctggggcagcatggaggcagggatatccagcagttccagaatctcctgatcccattccagagtattgatattaaagagcaacgtccttgatgcattggagtagtcggttacgtgcacccttcccttagtcagtttccagatcagccatgtctccaccgttccaaataaaagttcaccccgctgcgccctttctcttgctccttctacatgatccagtatccacttgatcttcgtcccggaaaaataggcgtcaatgatcagtcctgtcttctgcctgaaaaactccgtaaggcccttgtctttcaacgaatcgcagaactgggccgtcctcctgcactgccatacgatcgcatgatatacgggctctcctgtattcttatcccatacgatcaccgtctctctctgattcgtgatgccgattgcggcaacatccttggaatcaacgccgatcttattcatcgcctcaaccgctacccccagctgggtggaccatatctcgtccgcatcatgctccacccatcctggttccggaaaatactgggtaaattccttctgtgccacgctgcatatctctcccttttcattgaatagtatacagcggttgcttgtggtcccggcatccaatgccataatgtatcttgccatatccttcacctctcttagcacttcttgtaagttactatccattgtaccaaatcggcggcataatggctagtctgccgcgacattcccacggaaatgtattctcatatgcaacagacctcccgcatcgcatccggcatggcccgggatatcctacccgcctccgcataccgtcagaaaccgcacttcatcttccggcttcacttttgtacgatagttatcaagggacacaatactgattccattcagggtaatcaggctgcgcctggcctctttataggccaggcgtccgtattttacgcggatggaagccagacatccctttacatcatggatatcgaatacttcttctttcctgcccgtaatctcacggagcgctccgtaataaaatatctttgacatgatccatcacctgatttcaaaaatttgcaaagttattaccgatgtatctttaattgccatattttcgccgccgaaggagttccatcttccttccagccgcgtaccttgtaatacttgggaagcattttatcaaggcgcactactgattttggattcttatcctgaggaacttttgcaaggcggtccggcaggctgtcgtcattcaccgtcaaaccttccctgtaattataaagccgctcaatattgtaccctcgttctcccagctgcatgaatcgtccagtcgccatcttaagcccggtgatatgcttcagcgcttctgcatggggcagaaggaacatggaattaaacggaaggagccacggcatgaatttccacatgacgcctagaaccggcctgacccatataagcaatttcccgcacagttttgtaaaccagtgggacggttccagcctgaataaaaaagacggaatcatgctgtaggcagtgaagaggcagaatcctgacgcagagacagcctccatggcattctgcatgagcacggtaagttcaggcttgcctttcgtctcaagaggatccgtggataagactcctaccgattccagcagcgccaggtatcctccgttcaggtggcatccgcccctgttggaagttgcatagccaagtcccatgcctacagattttcttggttcataggaagccagttccaatcctttggcatgaatcgcggcgtccttagcgccatatttttcagccagccatttggagccgttggccagttcgctatagattccttccctgcgggcaatctttttaatcatttcaggaaggccggcggcgtcgccaaagcttacgccaaagtccgcaattccccgttcttttagttccatggcaaatgcaatcgtcccgccaagcgagatggtgtccattcccataagatctgcgatatagttgatttcattgatcgcgtccagatctgcgctttcgatatttgccccaaacaggcccaccgtctcatattccggacctttcacatccttgtcatagacccggactcttctttcgcaccggatcgggcaacttacgcaccccatattcttaaccaacttcgtatcagccaatgtctctccgctgatctcttcggccttctcgtaaaatcccttctggaaattcctggtgggcagggagcaggtggcattggccttcgtgaccagtcctgcgcttccatatttgggaagggaggttccggtcatcggatgggattgtaagaaatggacccatttttctatatgttgatcaagtttttctttattatagatgcaaggagattttgtaccgtatgccgtcaccgctttaatatttttagagcccaggaccgcgccggctcccatcttccggccactctttcgcccgacagaactcccgcgaagcttaccagattctcaccggcaggacctatgacgatggtaccgtactgccgggggaattctttctgtacctgttctgtatccatcccccagagatgcccggcttcttttacatggacatttccatccaggatctcaatataggaaggagccttcgacttcccagtcagaataatcccatcgtatccggcctttttcagcatcattccaaaattaccgccgcagttggaggatgcgatgcctccagtcatcacattcttgaacgttatattgaacctgctggaagacggcgctcccgttccgttcgccggccctgtattgataatgatcatagcctcttccgaaagtggatctatgcctgcgggcgtcagatcatagagaagctttgccgctaatgtcttgcctccgatgtaatatcgaaatgtctcagcatcaattttaaaacgccgtacttttttcgttgataggtttatttgcagataaatgggcagattcattcggcctcacctgctttcatatagattgcgtgaagcggacatgccgactcacagattccgcagcccacacatctttccggagccgctagttcggcaaatacgctgatgtctccccggtaggatggatccgctattttcagcgcgtcttttgtgcagttccagacacacatggaacaggcactgcatttttctctcaggataacgggctttttccatttgctttttgggacttgctccgcctggttcccggcttggtcaagaatggctccctggccacaggctctaccgcagacgccgcattccacacagcgcttctcattaatacgatgcctctcttttaacgtcccctcgaccgcgccaacgggacacagttttttgcataatgtacatccgatgcacttttccgttataaaataggacattctttcacctctcactattattcataggtccgggctatcccactctgcccggagaaaccgggaatgttctcaaataaaatcatttctctgaaaatgcattttttcttcacctcagtcaattttcttattatatcatcatctctttaattaattataatccttctgcaatttaattgcgctataaatatatatttaacgaactgaaatcattaaaaatgtccggcattattccgacgcaaaaagacccttgcagaatgtacctgcaagggtcttgcctgacgtgggcgagaggattcgaacccccgaccttttggtccgtagccaaacgctctatccagctgagctacgcccacacgactatgaatcattttcacagcgaaattaattatatcctagtttgtccttaatgtcaatatcattttataaaaaagaggaaaagtatgctttatataaaaatagtgtcttcgacacttcaactcccctgcccctcaatcatgagggataggggtttctttttgcttcattttgcttcataatggtcttatgaatatcttacaaaaaatttttatcgaacattatgaagaaatgatttatcttcaacatcctcgtgatgctattgttgagaatgtagaaaaaatgattcattgtggcgatccatcttatggtggcgccatgtatatttgtcccaattgtggtaatttcaaatttactgcttttcgttgtcattctcgcttctgtccaacttgtggtaacatgtattccattgacagaactactgctatgtcttttaagattattgatgtacaacatcggcattgtgtttttaccattgatgattctttgcggcctttttttcttaaagaccgttctcttcttaactgccttttttcggcagtcaacagcgtgatttctcgtatgttccataaagaaaataaatctgtattatttactcctggatttatttgcgtccttcatacctttggcagagatttaaaatggaatcctcacattcactgccttgtttctgaaggtggtgttggtaatactctttcctggcgacacttcaaacattttaactatcattttttacgtgatgcgttccaaactgctcttttaaatgaactccatcaaaaaataggtccagctttcaaaaaagtaaaatctgctatctatgcaaaagataaaaatggtttttatgttcgcgccatgcctaacaagtgtaatccttctcaggttatcaaatatatcggtcgttatcttggcagacctgttattgctacttctcgcattgattcttacgatggtgattttgtcaccttccattacaaccgtcatgaagacaataaacttattacagaaactgttcctgttttggaattcattgaccgcttaacacaacacatccctgaaaaacattttaaaatgattcgctattatggtatttacgctcgtcaccgtaattctgacaattttttacgaaaagccatttccagagaaaaacataacttttttctttcactcaataggtggcgtgattcaatcttacattcttttggttacgatcctttaaaatgtccgaactgtggaaaaaccatgctatttttagaactatattttaatcataatcctgttcctttgcatgaattatacgaaaaggctatgcaaaaacatagatgtcgttcgcctgcctcgttttcatatcttccaaaacctcttttctcatgataaactcaatatatcttaagaacggaggccacactatgaaacgtataacagaagcagagctcgcaaaggaactaagggaacagtacattaaaaatccaccagaaggtatgacttctaaagaagtccatgacatgagtgacgacgaacttctggatatggattatttcttacatgaatttgataaccttgatgatgacgattttggtgaagagggcttttacatcttttaatccaaaccgtctgattcactatgcccgcttttgagcgggctattttagtccccaagttctccgaaaggagaactttcctataaagtaaaaacagggcagataactctgccctgaaaaagatcgttctgtatattataaacgactaaacagtacaaacgttaactgctttcagctttctgctgtcttttggatctgcctctacatcaaaagtcactgcctgaccttcttcaagagtcttgaatccatcgcacataatagctgaaaaatgtacaaatacatctttgccgtcttctcctgtaataaatccatatcctttttctgagttaaaccattttactgtaccattgttcattaagcggtacctccatattctaattttgtgctttttggataataaaaaaacggcctttattcgtaaatcatgtggaaacgacttacaaacataggtccgattcatacattacccgattacatttattactatatcatgtattgctttaaaagtaaatagaaacttttcaaaaaactggcctgtttgttttctttttatctggactttttaagccatccactttagtgatagtatagtctacagaaaggcaattgcaatctataatacattaaaggatgtgaaccgacttgacgaaaaagatcgctgtaatcaatgatttgtccggattcggccgctgctctctcactgcggccatctccgtccattctgccatgggcgtccaggcttgcccgcttccaaccgcaatcctgactgcacagaccggctatcccagctactactgtgatgactacacagacaagatggagcattaccgcgccgaatggaagaagatggggcagcatttcgacggcatatacaccggctttgtagccggagaagcgcagatccggcagattttcaacttcatagacaccttcgacagcccggatacatttctgctggtagatccagtaatgggggataatggacgtacctattctatctttactccgtccctcctggcacagatgagaaggcttgctatgagggcagatatcatcacccctaatcttacggaattctgtcttctggcggaagcggattataacaagatcgccaactttacacagatagaccagcagctgtccgccatccgcgcattgggccagtcgttccgccaagacggcccccgtgacatcgtcgtcaccggaatcaatttcacggatgctgacgggacgcagcaggtaggcaacctatatatgaatcataaggattcttttttctgctctctgccttatgttggcggaagctactcgggcactggggatttattcgcctcctgtatcagcgcggggatggccagaagcattcctctcccagacattatgcaaactgccggacagtttctggaactggccatcaaggataccgtagcagatggaatcccccgcaatgatggcgtaaactacgagaaatacctgtcttgcctaattccggaatgtaacaatttttttaatcataaggaaggatgatgaattatgaaaactaccaacaggcccgctgccctcatcaccgtcaccggcctattcgcagcaatgatagccttgatgaccgcatatattttccacataccctatggagcgaacggaggatatatccactttggagatgctctgatctatatcgccgccgtcctcctgccccgtccgtatgccttggccgcagcgacgatcgggggcgggcttgcagatctcatgaccgcgccaatgtgggcgcccgcgaccatattgatcaagatgcttatcacgcttccatttaccagccatagcacaaagatgctggagatgcgcaatataatcgctccgctccctgcccttttcctgtccgcaacaggctactatctggcggagggcatcctcttcggctcttttgcagcgccgctggcttctcttgcaggaagcgccatacagtccggcggaagcgcggttatctttcttcttaccgcggcagcgcttgaccgaatccatataaaagccaagacacagcagtttttattcagcaatcactaagattacagaagggaaggatatacgatggctgatattttatacacttacaaagaccaggtatatgctaatattaccaacaaatgcaactgccgctgccgcttctgcatccgaagccacgaagacggcgtaggcgatgcagacactctctggcacaagactgatcccacacttgagcagatcaaggaagctatggacgcctttgactttgccggctataaggaactggtcttctgcggctatggagagcccacttgcgcgatcgataacctggtcgcttcggcaaaatatgcaaaagagaaatatggactgtccatccgggtgaacaccaacgggctggcaaacctatactatggaaaagatgtcattccccttcttgcacaagcggtagattccgtatccatcagcctgaatgcgcctaccagcgagcagtataatgaagtttcccgcccacagcttgacaacgcgtttgaaggactccttcaattcgcaacggaatgcaaaggacaaattccttcggtgaaacttacgattgtagatgtgctgcccaaggaggaaatcgaggcatgcaagaaattggccgcctcgctggatataccactaagaatacgcagatatgcctaacggctgtctgcgaaatatgggggacggaatatggacagaatattaacttatcagattggcccttctgagggagggcttcggattgagcagtttctcctgcgcaggggatactcgcttcagaatctcacccagttaaagaaaatgaaagaaagcgtgcttgtaaacggccagtggcttcatctgaaccgccgtcttacatctggtgacgaactggtgatccacatacaggaacatgaatcctccaaaaatattcctgcggtaaacctgtctctggatattgtgtacgaggatgaggacatcatcgtcatcaataagcctgccggaatgcctatccatccctcccagaataattacaggaattctcttgccaatgcccttgcctggtattatcaggaacaggggaaggctttcgtattccggtgcacgaaccggctggatcgggatacttccggactcaccgttgtctccaagcatatgctaagcggcaatgttctgtcgtccatggccgccgacaggatgcttcaccgggaatacctggcaatctgcagaggccatatcacgccctctgtcggaaccatccatgctcctttatcacgaaagcccggctccattatcgagcgcaccgtagactgggagcagggagagacagccatcacccattattgcgtcgtagatgaaaagaacggacacagcctcgtctcacttcgcctggagactggccgcacccatcaaatacgcattcatatgaaacatctgggctaccctctcatcggagattatctgtataatcctgacatggaatatattgggagacaggcgcttcattcccataggctttcattccctcatccaattaccggggaggatatggaattcatcgcgccgcttcccgaggacatgcaatcggtgctggatccataaaccttaacaggccttttgcctggcttatgattttcttaagaatctttagaaatttttctgactgttgacatacttacgtcacatttattccttataataaacttatcaattaaagaagacggtagtcgtactgaggtgtctgtatgattaccggacttcgcctaacaatacgtaaaatttacatagattttttcatccccctttcgggccggcgcataagtgccggctctctctctgtgcaaaaaaatgaataatttttacattaggtattccctcagacgaatctcttatgctataatcagtacgtggcttccatccgaagccatacactatgcagcagtggtcgagttggctgaaggcgtctgcctcgaaagcagaagagccgaaaggctccgggggttcaaatccctcctgctgcgttatatcctgccagtacatctctttcggtacatgcaggatatatttttccaataatttcttccgtttttttaagattctttagaaacatttccgtcttctgacatatctgcttcacattttccggctataataatcatatcagtatcttaatcctccctatcatgagcctctatattctgatccatgctcccagaccggaatccttccagatcaagcgcaatatagacatagcccaggctcttgagatattctgcaatctcctttttgtattccatgaccacgtccatagcctggcagtccacctcgattctggcaatatcgccatgaactctgacccgtacattgtaaatcccaagttccttaagataagactctgcctcttccaccttacgcatatccgcataagtcagcctggttccataagggaatctggtggccaggcaaggcgtcgaaggcttcttcgctacggagatcccatattctttcgcaagcagcctgacctcttctttggtaatgcaggcgtccgccaaaggactgatgattcccagttctcttatcgcgcggatacccgggcgataggccttaaggtcatccgcattggtcccttccattatccatcctgcctgcagcttagcggcctcgccctggatccgctcaaacaaatgccttttgcagcgatagcaccggtctgtcggattgtccgcaatctgcgcggtttctagttcatcaatcttaagtatcctgaaatcagccccaatctcttcggcaacccttttggcgctttgcgcgtcaccagacgggtgcatcgccgtatgaaggaagactgcatacaccttccgattactttttaacgccgcttcgcaggcaagtttcagcagcaggctgctgtccactccgccggaaaatgcaacgatcacgtccttcttggcatagccttccatctgtcttctcaggcgctgcatcttctcttcgttccttttcattccctttcctcttcctgccttcctcttaatcccagcctgtttatctgggccgcaatatagcccgccccgtatccattgtcaatattcaccaccgagatgccattggcgcaggaattaatcatggtcagaagggccgacagtccatgcatgctggcgccatagccaaccgaagtcgggacggcaataaccggcttatccaccaggcctccgataacgctggcaagagcgccttccatgccggccaccgcgatcacgcaattggcccgctgtatggtctccagcctggcgagcagcctgtgcagcccgcttactcccacatcgtaaacgcgctctacgcaggcgccaaaatattcggccacctgggccgcttcctccgctaccggaatatctgccgtgcctgccgtacagacggagatgcggcctgctctttcctttccctcatgttctatcttcagtattcctgacgtctcatcatactgcacctgtgcgtatttgctccttatcagttcatattgttccctggatgccctggtgccaaggacttccccttcttcctcatacagcctgccaaagatcgcaaggagatgcgcatctgcttttccggcacaaaatacgacttccgggaaaccggagcgtatcttcctgtgggtatctagcttggcataccccagatcctcaaaaggctggcgtctcaaggcgccttctgcttcctcaaggctcagttcccccttctttaacctttccagtatctcgcgtgtctccataatctcctcctgtatgtatgcatgctattcatcctgtttattgatctctttcttaatattttcccagactctttccgacatctccttatactccgtctcctccacgccctcttccggaatgacatacttttccaaatactcccattccaggctggcatactccggataccgctccataaattccgtatattcaacgatcctgtcctcttccagcatcctcctggccatcttcatatatccattaaaagaaaggccatgattacgattagtccttgtcccgtacgcaaatactacgcgtatataatatttaattttgcttaaagaaatccttatcttattcatacacatatttataccaccatctactgttttttaatatatgataactcattttgagttaaatctcaacgtgattggttcaagtataataatatgtttccgataggagggaatttgtatgacgtatcacgaagacttgtatatgatttatagagatcgtcttagggcgctgcgagaagatagcgatctttcacagaaaactatcgcggattatctcggaattggtcagactacttattcccaatacgaacttggcaaacgttccatgccagtagaatatattatcagactctgccagttttataacgtttccgcagattatatgcttggtttaacaaatgagaaataaagatctattttcggatatttgcaaccagcttgttaatgtctgcatgactgccggagcgaataagtttctacgaaccctatcttactaaccacttattattttgcttctatcgctttctgttctcttaatttttgatttgctttttctacattcaattgtgtaagcagtaaagctaccagaatattaataatcattgggagccacagatacataaagtgaagcatattaatacaagactgtgactgtactgccagttttccatcgaaaccaccaaagtcaagtaaccatcccacaattgctgtgccaagtccactaccaatttttaatcccatagaagtacaggaatacatcgttccgtcaattctctttccatactgtaaaaatgtatgttcagagcactcagctactaatgcatttaagtttccctgccatggagccataccaatcgctccaatcgctgtacccgccagcataagaggaacacttcccatatatcctgcaatgatcacaattccacgtccagctgctgcaatcaaatatccagagaagttcaacttataatatcctttatattttgctaccattgccggtaaaaacgcaagacctataataagcgccagatttatcgctccagaaaatgttccgagcagttctgcttttccgagtacgtatgtcatatagtaaattccacagtttataattgccgaatatatctgtctgaggatatcaacaacaagaattacgatataatatctgttatgtattaacatcttaatagattcaatcaaactgtatttttcttcttcggatttttcctctccatttctcagttcttcctctggaagttcttttaccgaaaatacagtcagtgtattagaaatcaagccaataatcgcataaataattgcgattgttctccagccttctgctcccccgccaagttgcttaaccaatcctactgtaattgtctgaataagaaaacttgtaccaaatgcgaacatgaagcggatagatcccatctgcacacgttcttttaaattctttgttaccagtgctgttaatgtggaatatgctatattatttgctgtataaaatcctgcatttaataacaggtaagtaataaagaaccatgcatactgagaagtttttcctaatgtagtcggaactgaaaatgctgcaaccagtgtaattgcacatccaaaatatgcaccaaacatccatggccttgcttttcccatcttggtatgtgtacggtcaatcattgaaccaaaaataacatccgaaacaccgtcgagtaccttcgatgctgcgatcagtgaaccaattacaccagcctttaatccaacagtatttgtcaggtaaatcataataaacgaagataagaatgcaaataccacattgcctcctatatcgccggagccatatcctactttgttataccattttaaatatctcttttcttccatcgtgttcactcccctattcatttaacatttttttcttactgcttcttccatcggaagcccggtatcataatccaattgtcttggttcatattcttcattctctcgctgtcttgtatatccttcattttcccagtctggaataaaatcggttctccacggacgcatactccactgatatccacggtataaatctctcgtatcgttcatatgctgaatcagtttatcatgtaatgcattgcgctcttctatatacttcttatcttcgatcaggttgttcatctcatatgggtcattttccagatcatagaattcatctgtatccagaagatggatgaccagtttataacgtttagacattactgctctcataatctgcagtccaccaaatccatcatgatctatctcatatcttgtaaactctgtaaatactacatcattaatttctttctccgggttcttaatctgtggaagcatactctttccttccagtaatttcggaatcgggagtccaaaataatccagaatcgttggtgcaatatcaatatgggatgccattgcgtcttctacatatcccttttccccacctttaataatcaatggaatatttgcgacttctttatatgccgctgcatttttagaaaataatctgtgtgcacctagcatatcgccatgatccgaagtaaaaatgaccagtgcatctggtgcaacttcccggattttatctaaaactcttccaatttcatagtccgcaaaggaattgcatcccaagaacagtgataatccatctgacggctggttaatttcatcttcagttgcatgcagattctttcccgaccaaagtctctgcataaatggtttttttgaaagatcatcctgaaagttcggacaactttcaaatttaaatccatcaaacatatggttaaacggctccggacaaagtgatggtccatgtggttcatcataggatacacttaaaaagaattcttcgtcctgatggttttctaaatatttgatcgcacggtctgaacaacgatgtgcataagtaaattcttctgagaaaccatctttataacattcttttggatctctggaccttactttttcctcatccgtcaactcatccagatatgttttcatatcataccagtattccggatcccatccttctggacatcgcccatttccaaaataatcagatccatccagatgccattttccaatatacccacatgaaatcccatgattgtgcaatctctgtccaattgttttaacattatcccccattgcaatactgttcgttaccattccgttcgtatgtggaaatgtaccagtaaaaattgcacttcttgctggaccgcacaccggctgacaggtatatgcattttcataacggataccttcttctgccagacgatccagatttggtgtcttcattttcggatttccatagcatcccaccatatctttcctggtcgtatctgtcatcagaaatatcacttgctttttcatctttcatcctcctcgatttcaatttatgattgattctgcccgtcacttaattgcatactcagtatagtaccccgattgtagtattcctatatcagattatgtgtttcgtatggacgattctgcttttccaaaggcaagcgcttgctgttgggatacaatagataggtaacataaaaaaacaaggattcgcttcgataataatctaaacgaagggagaatccttgcatgtcaatcttatcacatcagaaataccaacgtcaacgaatggttatatatacacagaaacattctaagaactaagacagatccgaaagagattaaaaaaatatcaatggacggatttacttttggcttctcaggaattatgtgaaaaagataagtgcctgtgaagttgtcaatacttttgactcattcacagaacgtggttcaagaaaaccttctgttgtataaggcttcaaatacggtattggggggaaggtaaggggtgaactcgcaatcatgtatccggaaaggatgccagagtagcaaaaaccgccggaatgccaagactaaatgcatgcccggattatggattattttccggccgctcttgacataccagtttatttctgatatgtattaaccaaggacttgacagcggaatccgccgtcaagccccattaattatcatagaagatctgaatttacagaaaccaaaggcaaacgcctgccatcttgacagtatttgattatgaatatatgcgaaagagagggacctctatgattaacgtatcaggtcactttagaaacgaacgaagatccattggctttgaagatcattccgcttcactgtctgtaaattgctgtggcatgcagatctttaaaactaaggattatacgcagaatcgtgcagctggtcgtgtagattaccagttaatctacatccataaaggagctggacattattacctgcacaaaaaatgggaaaatctgagtgccggaaatattctgctgttccgaccacatgagcctcaaacttattcttattattttgaagaacatccagaaatctattggatacacttcactggaaatgaatgtaaagaaataatccaaaaatacaacctgcataactgttatatcggtgaacatagtttattaaaaacgctatttcaggaaataattatcgaattacaaataaagaaaccctattttgaagagatggtgttaagtaatttcctacagattcttgctaccatcgcacgttctcatcagcagattctctctcctcttgagaatgatttttccataaaccgccttgtaatccagttgaatcagaaatatatggatgactggaacatagagtctatggcagagtattgtaaactcagtaccggatatttctcacatctcttcaagaaacgtatggggagtgctcctatgaaatatctcacagagcttcgtatagaaaaggcaaaagaattgattgctactaattccatgaatttatcagatattgctcaaatggtaggatttaccgactccctttactttagccgagtatttaaaaagactaccggaattcctccaaaagaattccagcagtcattgcttacttcaaatactcccgactggtgggctgattaatattcagtccactattttattttttcagcattttcatacctcttgatagtttgttatgcctgtctgtacatgcacaaaattataaggaatatgcactttttctctcataaaccatcaacaatttacacgatttccaagttccatgatttgttcataacaatgttcaaaaaatatttgatatccttcgcaaaagtaattcaaatatccggagtccccctgctcccggtttctcatacatccgcctccgcaaagtctgtagtacctgcactttttacattttaaatcaagctccattgaacgttcctcaaatcctaactctttacgtttttcatcaatctctgaaataatgtccgtattcagatttcccaggtaaaagtcgtccagcacaaaaaaatcacaaggatacacgctgccatccgcttccactacatactgaattccacactgccccctctgttcacaggactcagccatataccctgctgccagccccacataattttcaaactgtctgatatacggatgacatccttttttcaggtcttcataccataatccaaatagttccatcaaaaactttccatactgttctggcttaattgaatatgcagtttttccatgttcttctccatatggatccagacaggcaatatattgttggtaatgccatccctgctgccggtaaaacgaataaatttcttttatattttcagcaatctttggtgttaccactgttaaaatattatattccacaccatatttatccagtaactttgcagtcttatttatccgctcaaacgtatcttccccattcttactgtgacgcatagaattatgtatcctggcagtaccatctactgataatccaaccaggaattgattttctttaaagaattcacaccattcctttgtaactgcatatccgtttgtctgaaatgcattgatcacccgtacatggtttcgattatattttttctgaaaccagactgccctccggaaaaactccagtccacgaagtgacggttctccgccctgccaggtgtagctcgcaacaccttctgcctgaagcattgttctgcgaatcaaattctttagagtatcttcactcatcattccatagaattcctgctctcttttggctgcttcatcacagtaaaaacagtaatcacatgtcatattgcacatcccggatgccggcttcactaatacacttatattcctcattctttatcctccaatgaatgatattccaaccttcataacccctgccagaaccataacccagattggattcatcttgattttccgaagtaatacgatgcataccacaaaaatcacgaccagactccattttgttcctgccagtgcaatggctgctgcatttccccaaaaggcagtaattaaaatagaaattcctgctgaggcaatcatcgcaaccactgccggtcttagagagttcaatactccctgcagcatagccatattccgatatttcagatacagtttcgcaataactgtaacaataatacaggatggtaagatgcatccaaaggttgccaccaaagcacctggaattcccgcaatcttgattccaacaaacgtagctgaattaacagcaatcggtccaggtgtcatctgcgaaatcgtaatcagatcggtaaattctgacatgctgagccacttatgcgccgtcacaacctgcccctgaatcagcggcattgctgcataccctccaccaaaactaaacataccaacttgtaaaaaactaaaaaacaactgcagataaatcatttttgtgctcctttccttacaaggaaagtccggattactccaatcattccacaagtaatgactatatatattacattcacgccataaatgcaggacgctccaaatgcacctgccatgatcagtaaggataatgcgtctttactctcaacaattcctgctcccatttcataagtcactgaagcaatcactgcaccaactcccgcctgcattccttccagcatctgactcacaagatagttactccgaaatgcattgtagcaaacagatatcacagatataatcaggaatggcggaataatagttccaacaattgcaaccagcgttcccaacattcccgccagcttatatcccaccacaattgctccattcaccgcgattgcccctggtgatgactgcgcaatcgctaccagatccagcatttcatttttttcaatccagtgataatcatctacaaacttctttttcatcaacgtaactattacataaccaccgccaaatgtaaaggcacttaaatataatgttgaaataaatattttccatagtacttttttcttacatttcataactatcttatctcccttcaccgtctcttagtatatcctcggttgacacttatgtaaaatactattattatatgaaatagataactttttcattatgtattttaggaggaacgcttatgacattacggcatttgaatatttttgtttctgtatatgagtacaacagtattaccaaagctgctgatgcacttcacattgcacagccttctgtcagtctggtaataaaagaattggaagaatattatggaattcaactattcgaccggatcgggcgtgggattacccctacagaagcaggaaaagaactttacagctatgcaattcatattgtctctctcttcaatgaaatggcgcagcgtataaaaaactgggataatgttggaactctgcgtatcggtgctagcattacaatcggtacacacattcttcctggattaatcaaggaatatcagaaagactttccctatctcagaatcaaggtaactgtaaataaatcatccacgatcgaacaacatattttagataataaaattgatattgggttaattgaaaaccagcctgatcatcccgagattctctctcaaccgtttatgaaagataatctttgcgcaatcgttccaaacgaagatccactttcttctaaggcgtatattacccttgaagaactggcttcacgtccatttctaatgcgtgaaaaaggaagtgccgggagagaaattctggacgcctgcttttctttaaaaaatattcatgtaaaccctttatgggaaagttccagtactcaggctattgtaaaaggagtttctatgaatcttggtgttgctgttcttccttatcttttaattaaaagagatattgaagaacataacgtcaattacctgccgtttaaaaccccgttaactcgagatctgaatattatttatcacaaaagcaaatacctcacccgcaacatgctttcatttattggactttgcaaaaaaagtgggcaggagtcatttggtgtgcatcccgtcaagtagacaattgaataaatataagattagtggacctgttgacaaactaaagaaaaatgactttctgtatggtatacttattatatcaattgcaggaggttactttttatgatggggatacaaaacggacaaatccaaatgataatccttgatgaaacgcttgtaaattcaacgtttcctttacctttaactaatgccgcagaccggaatcgaacttctgcggacactcaagaaccgcatagaaagggggattgtgccacctctgctgacagttgtacaagatttgtacaacttttttgtacagaaatattttccacttcacacacagttcattcacgcattaaccacttcatcaaaagacattatcatctggataatgtgtcataatatcttctacttcacagtccaatatattacataacttgtcgattgtatttacttccacattcttatcatgtttcagtctgttcagttgagaacgattcatgtgataccgtgtatacaaatcatattgcgtaatccctttggatttcattgtttcccacagtttatcatactttatcattttacgttttctactttcctcaaaatgctattgctatgtaatcattattagcgtaaaatgaacttagtaatagtgttcgtatacgaacactataaggagtggaaagatgaagaaacgctttattatagtattcgtatccgtcagcattataactattctcgcatatttgcagttcggacgagatgtaacggcaaaaaatagtatctctaatgtttccgggaattattatgaacaaaatttgacggtcatagcaaataaactcttcatctatgataaggaaaatttttccgagcaaatattagaacgctgtctggataattcctttcacgatatcctgttttcttatgacattacaggttatcccgatagaatatgtatatctgtttacacaaactctttgacatacagtttcggtatcgaaagtattaaaattcaatacgaatcaacttctaatcattcagaaaatgttactgacgctcaagacaaatttaagattctcattgataccaccaaccactgataaaaagataaaatactattccacatctatactattttttcttacagtgatacaatgattgtacaaacaactatgaatttagggaggcaaaaatatgttagagtttaagtatgatacacaacttttgattgagggcgaaaatcttgatgaagatataataagtgaatactttataaagaatttcaagggagactgtttgctcgcagttggggatgaagagttgattaaaattcattttcatacaaatgagccttggaaagtgttggagtattgttcgagtcttggggaaatttatgatattgttattgaggatatggataggcaagcgagaggtctaaaaggataaaccccggtttgacaaattaccgaccattccaccacctagtgaggtaaaggaacaaggcgaagccgatacgccgtagggcagtcctttacggaacggacgtagccaacacaaccatgatatagcagaggacttgaaaggtcacaaccttgcaagtcctcttgtctgttactgattctttgattctaagtatgcaacttccttttcgacttctctaacaaatgcttcaactggaaatgctagattctcgcacttttcgtaacaattcttttccggcgaataggcgagggcacaaatttctgtttcgtaagtcttagtgtcaatcccgtagtagtatatctgtgaactgggaagtatcagccggatcgtgttaaagtcttttgtaaaaatctcatgtcctcccggtgtgagaagttcttgcggacactgatagaaccgtctggaatcttccctgagaaacaatggcagtatgtgcagttcattcgcttttatatctgcataaacatagaatcttggaatgagcgcactatattgtgtcattaatcctatataagcggtatcgtcgttattcagcagatattcggattctttatagaatacatattcagtaagtgtactttctcggtcggatttgttttccataggaacgttttctccggcgagccagttcagatttacatcaagtgcatgagcgatcagttccagtttgtccagtttgggattgtataaccctgaaaggtacgaactgaaagcccctttgctgattcccgtttcccgtaccagttccgcttgtttcttatttctcacgttcatagcaaatttaatccgttctgcgattgtgttcatgtacatatcctccatttacctatctactcatatcttgttaattcttgttataaatccaccataccacaagtttagaaaaaaagaaacaaaaagtttataaaaaactgaacttttctattgcaaaaagaaaaccggtgtgttaatatacaattagtttagaaataactgaactgtatgacgtcataaaaatacaatggaaataagaatggctgtcctaccggcagaacggggagaaatggagaaacgtgtatgcagattacattgacaaaagagcaggtaaaagaagcgtttggagaacttcgctatatgggtgcagattattgttaccgatacgacaaggaaaatcggaagaaaacagaggaagtggaagcgttaagacttcacctcggcagtatgaaacttggcaacagtgtggatattcggctggaagcaacggaacttccaaagattgaaccgtattccgtagtagaattagacaatgcggtctatgacccgtatgtaatgagagggaattatccgacactggttgagagagtgacttgtaaagggattcatactgtttccggcaagaacatgtaggcagtcacgctttgaaatctctgcctgaccgtacagcgtgaaaggtcaggcgagagattttgaagcggtggcagagtcacagagaagaaaaggcaggtggtagagaacgggaaacagaagtttttcagaactcccctatactaacaggggagtaactcgtcagaaagaagagttatcggcactgattgactggtgtcagataacagtcaaagatactgacgtattcacaatcatagaggatatattgcggattccgctgaattttatggaacttcactgtaaaggaaaaggtattgcaggacatgaattgatagcgggctttgataacattaagattctaaaacctacgggaaatgcacagtatgaaggatttcagattcttatgagtggttcgggatgcagagattatgaaaaattcctcaccatgaatcaggaaacgtggtttgatttcttggaaagagtttgccgatacaatgtaaatttccctcggatagatttagcaattgatgaccgaaaaacttatttgagtatatcagaacttatcaggctaaaaaatgaggggttgatttccagccaattacgagacatatcggagaaccactcggataaacttacggaagataatattgaatccaatggaaagagcctttatattggcagcaaaaatagcgacttccgaattatattttatgaaaagggatatgagcaggcggagaagtttggaaaagaattagatataaactggaatagatatgaacttcgattccgcaagaagaaagcggtcagattagtgcaggaactattgaaagataggaatgtgacaagagttgcaatgtcagtattgaatgataaggttagattcctgcaaaatccagaaaacagttccgtcacaaggaaacgcttgtatccaacttatcttccttggaaagaatttatgcaaaatatccccaagataaaactgtgcatggattctgttccaatagataattatttgcaaaagaatcgggaatggctcattaagaatgtagcgcccagtgttaaaatgcaaatgatttgggataaaatgaacaacaataaaaatgatatttttaaggaaatgtcgcacgcacgcttaaatgaaaagcaaaaatcagccttgcaaaccattgaaaagcattatgaattagagaattatatttagtaaataaaagatacatagaacaaaaaagataacatgaaagatatttgacaaggcgaatattcaggtaaaggagggcagacaatcttatccgtaaagataagcaattatgttctatgtcaaaacgccactttatacagttgacagacgcacagaagcgattacacgcttctattgaaaacttgaaattatatatggaaaatgctacactttcttcagcagagatggcacagcatatagatatgacaaggaaacaaaaagaaaaactggtaactgctatttatttcaaagacaaaaaaagaaaggatttttatacttgtacagacggacggattaagtcttacaatccacaatttattgctacaagcagagaacagttgatagacaagttatatgagtattattttgacaatatactggaagatgtctataaaaactgggttcaacatcgttctgaaacaaaaattgtgtcgggaaagacgattgaagaagacattgggatttggaatcgttttattgctggttctgaaatagccactatgcagattgtggatattaagccaaaggatttgatgaaattgtttcaatcgtggactggcaacggactaattacccgaaaagattttaataatcgaaaatctgtgttaaatggtattttcagatatgcggtgctaaatgagattatcacttacaatccgattacttctcttccgtgcaatgatttgaagtataaaataccaatggcaaagaagaaagcctacacaaaagaagaacgctccgcactgcttgcttatttaaagagtttagagccggacgcttacattcttgcaattatgcttgcgttctacggaatattccgaattggtgaaatcaaagcattgtcatgggataacacaaacgagaatgtgattaccattcaacatcaacttgtggaggaacggatattacaggaagatatgacactaagcgaaccgcaaagaatcttgaagaatccgaaaggaaatccatattacagcatacggacagaacaacttccgcaagagggtgtgtcagttctaaagaaaatgaaagaactgaatcccgacggaaagtttctctttatgcatgagggcagaccattgacaacagattcatttaaccgtcgtttaaagaaatactgtacagagataggaattccctatctatcaagtcacaaaatacgttttacgggtgcgtccatgctctatgatgccggagtaaagccgattgatattcaaccacttttggggcactctacgctcactatgacgcaacattatatcggtcagcgtgtagcagaaagagatacctcgcaaatggcaaagatattggcgtaagccttgtatttacgggctgtacaactttgtacaacttttcagagaaaataaaaaatgcttcaagccctctatttacaagggtttgaagcaccttaaccaaatgccgcagaccggaatcgaaccggtacgggagtataagtcccgcaggattttaagtcctgtgcgtctgccagttccgccactgcggcatatgggacctatagggctcgaacctatgaccctctgcttgtaaggcagatgctctcccagctgagctaagatcccataaaaacaaacataatagccttgcctcaaagttaagataactttgtcaagtcggcaggctgcggctttctcatcaggcttttaactcttgccaaatggtcatgccgacgacccagaagagactcgaactctcgacctccgccgtgacagggcggcgctctaaccaactgagccactgggccagataatggaccttcggggactcgaacccaggaccgatcggttatgagccgattgctctaaccaactgagctaaaggtccaaaatcataaaagtcccttataggactaagccgatgatcggactcgaaccgataacctgctgattacaaatcagctgctctgccaattgagccacatcggcgaatttcaaatgactccgacgggaatcgaacccgtgttaccgccgtgaaagggcgatgtcttaaccgcttgaccacggagccattatagcctgttccccggaaatatcgacaaataattccttgagcgaccgagttatatattatcacatgggcatacttttttcaagcctttttctaaaaaaaccgaaaaaattttactcctttttttatgacgttttccctgctcctttacctttggataacttgctgcctatatactagcactcccggttctaccacacagaaagccagattgctgattatgttctcaacaatttcagggaagtatgctttatgacctcgactgatttgctgaaaaactgcaaataagccattcctccgtcatccgtttcacaaaggatctcggctatacggaattccaacgcgcaatccgggcacaatacaacgactatattgataactattctgatacgccaacgatacctaccgtcaaattgacgcagagccttaagaaactgaccggcgcaagtatccgggaagccgtatatgagactacttgcaacaatttacagtctgtcatcctgcatagttcgtctgatctatttgaaaatgcaagcgacgccatcatagccgcccagtcaaaatatatcgtcggctccagaggatgtgccgcatcctccgctttcctttccgtcatattaaaggatactttgccgatggtatttgcagagcccacaggcgtcatgaatacgttcgactttctgtccgacattagccgaaaagactgtctgatcgcaatcagttacccacgctattccaaacttacttaccttgcagtagaaatggctgccaaagcaaaggccaccatcatcgtattaacggatacgcccacggctcctcttgcccgctatgcagattatctgctgactaattccgtggattcgctcgcgtttttcaattcgcagatccctgctctattcacagcggaattattatgcacatacatccgcaaaaaaattggaaataaaaacgaggagaaactgagactgatagacagatttacctctgcactggaactgtactagattctttataataacgataggaaagagcaggcgcgcaatgcataatcaacgcgtctgctcttctttgctgctatttatcatagatggccatatctgtcttcttaaactggcaggataccaccgtagtgccaaccagatcgctggtattattcagcaccgtatgaaaatccattcataccgcaagtattgccaagcggcagggtaaatccatagatattctccggaattcccagtttctcctgggccgtcttgattgagaccggaagcgttgcggccgaagatgtggtggaggctgccacaattatgggttctacaatcttcttcataaaccgaagcggctgtagtttcgcaagagttttgatgattaccgggtataatacaatcaagactataatcgcacatacataatccgtcacaatgaacaccagcacttctttcatagtagagccgctaatcgttgctaccatcgtcgccataagggaggcaattccgatcggcgagaaggccattacaaattccgtaatcttcagcatcgcttcgcttccctagtcaatcactttaatcagcagttccgctttctgccccagcgcaagaagggcgacccctaagaaaatcgcaaatataataatctgaagcatgtttgcttcctgcctttggcgaaatgaacccgatagccaggccgattacgataccgatcaatatctttttccccaatgatagttttcttaatttccccatatctcttcctccttaacctgcatattctctggctatctcgccggttattttcaagaacttatcaatatcttctgttccgtggcaatgtaatggagatacccggatagcccccgtaagtcctaacgcttccactatttgtttggaatatatgcttgtattgatacgctcgtagaccgtaacgccacgcttctggtattcagctactggcccgattataaatgagaataccaaggcaaacatggtgggaatcgtgatcagcgaagtttaccgtcacatcagagacctccggataacttaggactatgtatgcttttacattctgtgtaatgtagtacatcaggatggatgaaacgtatatgtttatcgcccatgtatttttttgttgttttgtcatctttttcctctctttccctttcttggacatttttttacacgtctgaaatgataagcattcgcgaagcttacgtgtatttgataagaccttaacactttgtaccctcattataattttggcccagatgaaaagtccaatatagaaactggcggtccgccatcgaaaatttctatcctcaaaatatgcataaaaaataggctggaaaacgatttttccaacctgcttttatctatcattaccatattcagtacttgtcagaagataatatccttaagcagcgtatcggacaattctctaagttaatcccttacgaacgttgtgatctgagacagtttccggttgcacggccaggtaaggtataaaggtagaacagacttagggctttccaacttcaccttcgtaagatacctttcgtccaccggaacatccgctgaaagcgccagcccgtttcccgctgatacggacagctgctgggagggccagtcggatacgtaaatcaggcaggggtcagtccttcttccttgaacatctccttaattgcaaggtccatattgctgttagcattgatagcaatcaacttctcattctcaatctctgacaaggaaacagactccttttgtgccagagggtgactcttcgggacgatcagcacgatcctgtgtctgccaatcagcgcagactcgcacccggacgcactgttgcctgcagatatgacaagatcgcattctccccgcagaagcagttccctcagaaccgcccagttatggtacacttccgtctcaaattcaatctggctgtagggcttctcatgctgaccacctcgttcttgccgtcttccagcatcttgattcccgcttccgcatacggaagaagcgcatgcccaaacccggtccagtcaatcctcttattgggactccggataaaaagcggcgcttccaattcggcttccaactcgcggattgcattggtcttggcaacctcgcagaaatatctcaattgcgtcaacgtcatatcttgatcccctctgttgtcgagcatttgtcaatgccggaaagaaagtatataccagccgatactgagcagaaaatagaatacgctcaatatagcaattaatatcaacgaaatgctgactcccttaagcaaaaataaaccaactaatccgaaaattaccataactcccaaaataaatattccaattataacagctaaaactatttttgcccctttgctccccttatcataaaaatattgcggcaaaaggaaaaggactaaaatcaatccgatatcagcccacatccccatgtctccaaattggtttgaagtaccgccggtttgcgcaaggggagataaggttgccagcacgattatcatacaccagatcaatgccaggatgatcgttaataccgttgtctttttcatatagttaccctccataatgtctcatcgttactatctttgattctcctttattctaggaaaataaaagtctctatacaataaggagggcattaacatacggtatcctggcaaaaaaggaaggcaaactcctcttccacgctatatttattctcataataaattatggcaggatccattgtgaattcattgttatgtgcttttaaatacctatcactttatatttatgcctggaatgcggcagaatcttagttaatatatcttccgtcttcaccttcatatatcctgttgtcgttccgtcgctgcagccataatattcggaatctgcaacttcctggtcaaaaatcacctgaatcgtcttatcccagtcatccagcacgctgtagatagtggctgcccctatcttggttcccaggatttcttcaaatagttcctgtggcgcaaaagatacccggggaatctccaaagcctcgcagaatttctttgtgtcaaacggctttttgtccgtggtaataaatagatagaacagggtctttttcttgttgcacagaaagagtgtcttaaccatgtccatatccagtttcgcattgatctgcacacagtcttccatcgtaattgcctcatccgtgtccacccttttatagggtatctttaattctgctaaaacctggtatactttttgctgcaaaggcgttttgaatgcttctggcgcatctgttttgatttcacttacatagaacatattttcaccttctttaaaaatcatttgattatttccaagccttattgtatcatacagacatcaaacacaataacgaatatttctcatattaagcatgacaatatcggatggataggaggatactaaatatggacatgaatatccagaaatatatggcatttgtaaaggctgtagagtatggcagttttacaaaagccgccgagatattgaactactcccaatccgggattagccgcatgatcaacgacttggaaaaagaatggcaagtcgtcctgttggagcgaagaaagacagggggcagactgaccagcgacggaatgaaactgcttctctggccgcgcgtcggttcctggaatacctggaataccgctaattcccgttatcaattagagaatcatcatcgcatgaaacacattgaataaatatcctacaacaataatcccgaccgtgcagattgcgataaacaccgccaacagcctgggcttgacggcttttctaagcatgatcatggatggcaggcttaatgtagtgactgccatcatgaacgcaagcactgtccccagctgcgcccctttagaaagcagcgcttccgcaaccgaaatggtgccaaaaatatcggcatacatggggattccaaccaaagtggcaaggattactccgaatggattatcgctccccaacactgcttctatcagatcctggggaatccagttgtgtataaatgctcctatggctacgccaataaggatgcaaggaaatacctttttaaaggtgcctgctacttgcttcctggcaaactgcattctgtctttcttcgtgagcgttggcgaatcgatatctacatttcccgcctgtgcaatgaactcctccacgtaacgttccatatgcattctttcaatcagcattcctccaataactgcgatggccaagccaattaccacataagaaactgcgactttcgctccaaatatgctcatcagcagtacaaggcttcccagatccaccatcggggaggaaatcaggaaggaaaacgtaacgcccaggggcagcccagcgctggtaaatccaatgaacagcggtatggatgagcacgaacagaaaggcgtcaccgtccccagcagcgctgataccacatttgcaccaatgccgtggaaacgtcccaatattttcttgcttctctccggcggaaaataactctggatataagaaatgacaaaaatcaaaaagcatagcaataccgttatcttgatcacatcgtagagaaagaactgaatgctccctccaagtcttgcgttaatgtccatgcctgcgccagccagcaggcttcctatcatttcccccagccattccatgccaagaatctgatcctgtataaatagcagaactgttctctatccaagtcgggcgtcgtaagcctcgccagacgttttaaggcccggtctcttcctgatgcgcttagcctgtaatgcgtccactttccttcctgcctgctgtccacaatgcctgactcgcataatatcttcatgtgatacgacaatgcggactggcctatgcccatatcatcgatcaggacgcaggcacatttctctccgcttcttaacaggcttataatcttaagcagcttttcatcacatagggccttaaatatttttgcgtcttctgtatatttcttttccataatccgccctcacatcaataatttttgataagcaaattacttccttactccatcacggtcagcagttccttgggcctgcatcttacaatcaccagaaaggataaacccgctgacaatgccacgataagcagtcccatcccacctgccgctagaacggctggtggatttaattccatattcaactgcacatccacgtctaccgcatccataccaatcgggcgatcaaaagaaaaactcgtctcttcttctaaacgctgctctgtcttgacgacagaatcattggccagttcaccggataccaacgctttccccgcatccgaaggcgctatatgccgtccttcttccagttgaaatagatccagcataaaatactcattaagcgcgctgtctgtatttcccaacaaacgggccatctgggccttgctgtccgcttccattgaaaactttctcgccttatgcacgagttccggaactgtcaagtagtaggtcgccatcgcattataagccttaatgccatcaatcttcatcacctgatcgatcatagactgatccaccgtctgaaggatgtccatcttctgatagtcggtctcaaccttaaagtatccgccaatctcttccctgagtctggccacggttccctctgacgcctggctgatagccgtgtccaaaagaaccagcgtcataatcgtcaaaaacagcaccagcagcaacgccaagaatccgctttgatcagtacccctcgggccggattatcttctggatctctgggaaaaagcagcgctggaaatcgaaaaatgccttgccggtacagggaaatagcagattcttggcaaactccgacaaagtccttctgactgcgtattttttcaattcgctgatcaatcggttcctccgtcaccgcttcccggtacattccatatccctttattccaaagaacacagcgcttcccagcatcatataaatcaggaatatcagacagttgaagagttttcgttttttccccataactacccattcctttctatcgcatccgcgtagaatccatgatcaaattgcaccattaagtcatatcatcacggagtgcgtcaataatattttccttccttatcttgctgaccgcataaagcatggtaataaatattactaggaacacgctgattatactgattccaatgcttgcccacggcagtacgaagtggctgtccgctatcattgccctgcaaatcatccacgatgaaacgatcgccaccggaagcccaaaaagcagtgatctcacgccataaaaggcgcactcaaaccgcatcattttgttgaaatcccggtcagacatccctacggagcgtaacatggcaagttccctccggcgcagcttgatattcgtcgagatcgtattgaacacgttggcaatagcaatcagcgatatcataataataaatgtataggaaaatacattggcaacaaagatataattccttccttcctcaagagcatccgatgtgttcataaaagtatatgcagaggtaagggacgcttcttggaccatggccttcatctcgttctctgattttggggggttctctgactggaaggtcaatcctttcactttcaagtccgccggattatcggcaggatacagatacgccttcatagaccagggcgccatcacctggaaagagtaaggcctctgctccgcggctccagctatcggaggcgaatccggcggtacggtctcgacgaacgtaacgcttatgttctggccttgcgcctcccctgtttccgcgcttgcctttggcatgacggccaggtccatagagggattcgtaaacatatccttaagatcgttcactccttctgccttttcatcgttcattttggcaacggcaatcattttcccattcttcccggtatattcctctgtcggcaagcccagatcctttacgatcttcagataagcgttgtcgtcaagaaactggatatccatgggcagtttcaccgttccctccgaagaatgccctccaacggctttccagtaatcttccgtaagttcgccgggactgactgtacacatatatgccacgaaggcctgataggaactttcggtaactccttccgcaagtttgagtttatcgaatagtttaagcatgtcagaatcatccatggcctgggttccaaaacctatatcatagctggtcaccacctttgcctgttttgtctcttgattcatgcttgttacaagggcgctggtggagacaaacagcacgatactcaacgcaagagacaagacgatgctcctataccgctttttattccttttaaagttcttaagtgcaagagttccttccagaccgcatatgcgccttgtcattcttgatattcttacagcctttgcctctactttgatctcgtttgtctggcggatacaatccatcactggtgttttggctgcctttcttgccgggatataggctgaaatcaaaatcgtgattatgctgactgcaaccgctcctatgattgccggggctgatatatccatggttaatgaaacgccagtataaaaaatgctgctgagttttttggttatacccatgattataagcccgatacttgccaggcccaggcagatgccaacaggaattcccaccgcgccgatgcaaagtccttcaaaaagtacggaattgcgcaattgcttcgatgtagcccccacggaggaaagaattccaatctgccgcatgcgctcattcagagagatgctgaacgagttatatatcaggaatatggaacccaccatgataatcgcaattacaataacgccagccgaatacagcagtgcattaaatacccggtcggatgggttgtccgatagtcccataacgcgaagcacattatggttcaggatgtatgcatggccatctcccgcgctctctgcgtatgagtggatctgccgcggattccgaagcgacacgaacacgctgagttctgccccttgcatgctttcctcatttcttgtgatcaaggtgtatcccggcgacgaatcctcttcaaagactggcgttctgcagactcctacgaccgtatactctttctccacctggggcgcgaatatctcagttccggctttgtagggatcgccctggcccagttttttatctccgtctatgcggttacccacggcgagagatatcgtatcgcccactgcgtaggaagcgccgccttccgctgtcgctcttccggacagaagaatctccctgtcattttcaggcagtctgcctgacagcaacgttacaggcagggcatcaaacgtcttctgactgaatcccgcaataaaaaaatatggcttatttggattctctccgccttcaatcctggcatatccgatattttcaaaggatacggtcttttccactttcttatcgctgcttatctcctttttaaaagaggagtccgcatctagatatgcgacctgccagtcgccatatttactggctgctacttctgccatatagttcatcagagagaccccaaaagtagtcactgccgtaatcatagcagcggacagaacgacaccgataatcgtcacgatcgtccgtgtacggttcttttttagaccttgcatggcaaccttattaaatatgttcattatcgtgccacctgcctctcatcccgcaccactttgccgtccgatatcccgatgatgcggtctgcctgtagggcgatattctcgtcatgcgtaacgagtagcaatgtctgcccatattttttattgctttccttcagcagcttgattatctcatgcccgttccggctgtccaagcttccggtcggctcatcggcaagcatgacctgaggcgcattcatcagagcccgcccgatggcgacccgctgctgctggcctcccgagagctggttaggcagatgattctttcgcccctctaggcccagcagattcagcaggtctttcagccgttccttatttaccttcctcttatccataaggataggcagcgtcatattttccactacattcagagtggggatcaaattgtggaactgatagattagccccacctgtcgcctgcggaaaattgcaagtttttcattattctgggcatacacatcctgcccattcagatagacttttccgcttgtaggcacatccactcccgcaatgatgtgaagcagcgtggacttgccggatccggaagaaccgataattgcggtaaattcccccttttctatggtaagagaaactccatcaagcgcagtgacttgattctcccccttcccataaaccttatatagattttcaactcttaaaaactccattatgtgagcctcctttttcataaatgttaatcttgaatttacccatataatagaactctcaacttacttttctgtgacttttaagtgagacatccgtcactttccgatgaagaatacgtcattttatatagagagtaaaacaaaaaacccgtaaatgtaaagttttcataaggatgtttttaagatttaggatttactttgccacaatgccttataataaaatagtcgttttttcataaaatccgtccgccgtaacattttgcggacatttgcctgttatactatcagcaaaaggaagtgaggatatgaaacaaattctgattgtcgaggacgacagttttttgaataaaatgctatcttataatcttgccgcagatggctacggaataacttctgccctaaatgccagaaccgcagacgaagtcctgctccagcgggaatttgatctggtgctgctggacatcaatctgccagatgggaacggctttgagttgtgcaaactgataaagccccagcacccggacaccatagtaattttcctgaccgccaacgatcaggagagcgaccagatacgaggctatgaggtgggcgcggtagactacatcacaaagccctttgtgatcggggccttgcagcggaaaatcaatgccatgtttgccatgctggaacaccacaaaccggccaaggatatttacgacgacgggcggctgtttctggacttctcggagcagaccgcttccctaaacggcaagcccctgaccctatccccgatggagtacaaaatgctgaacccgttccgtaaaaatccccggcaagtgctgacccgtgggcagcttttggaaaggctgtgggatatagacgagaagtttgtggacgaacacaccctgacaacctccatcagccggattcgcagcaagattgaatctgatggcgacggacacgctattggaaaagcccatgaccgaggcggagcgcaccgacttcatccggggaatctgcacccagacggataagctggactttctctttcaggcccttgtgaaaacctcccggctggaaacaggcgtgatccagttggataagaaaccgggccgcctctttgataccgtggcgcaggccatgagtgggatcgtgtatgcagcagagaaaaaggatatcgccgtatccgtggactgcccggaagatttgacctttttccatgacagcaagtggacatccgaagccctctttaacctgctggacaatgcggtgaagtacaccccggcaggcgggaaaatcacagtgtcggtggtgctgtgggaaatgtatgtggagatcaaagtagccgataccggcaagggcatttccgaaagcaatcaggccgccatcttccggcgtttctatcgtgaggaagaagtacacgaacagcagggcgtgggcattggtctatatctggcccgcgagatcgtaacgcggcagggcggctatatcaaagtggtttcggagccgagcaagggttctgagttttccattatgttacctacaaaatagaacgcggcggacggccattttcggctgcccgccataaatttttttgaaatgtccgagcgttgtaacatttcaccccgattttcattgaatttttttggccgctgtaacatttcgcggacatttgggttttacaatacccttatcaataggcgggaagccttgaaaggagtttttgaaaatgagcgttttacagacgattaacctgaaaaagtattacggtacagagccgaacattacccgcgcccttgacggcgtgaacttctccgtggaggatggcgaatttgtggccgttgtgggaacctccggcagcggcaaatccaccctgcttcacatgatgggcgggctggacacccctacttccggcaatgtaattgtccgggacaaagaactgtcgaaaatgaacgacgaacaactcaccatcttccgccgccgcaacatcggttttatcttccagaactataaccttgttcccatcctgaatgtgtatgagaacatcgttctgccggtggagttggacggggacacggtggatcagaagtttttggacgagatcgttcacctgctggggctggaagataaactcaaaaatatgccgaacaatctttccggcggacagcaacagcgtgtggcgattgcccgcgccctgattaccaaaccggctatcgtactggccgacgagccgaccggcaaccttgacagcaagaccagcgcagaggtgctggggcttatcaagcgcaccagcgcagagtttcgccagaccgtcgtaatgattacccacaacaatgacattgcccaccttgcagatcggatataccaggtgagttaattcaggcattggaatcctcggaaatgtttgctgatggaggcagaacttatgtagatacctctcaaattacatttgaagtccccaaacattcgcgaactgaaagcgaccagcagcaatatgtgactgcatttggtggagtaatgtacgagttaggtgaaaacaatgatttgtcctgtttcttgtatggaatggatgattacactttatctaatcttacactaacaaacgaagaagaaagccatgaaacattagaaaaaatacagtcgggaaattatatacttgttaatgaatcgggcttaaacctgataaaaccaggtgatcgcatcactttatttagtaatggtgctgcatatacatttgaagttctggatcttatagttccagatagcgaggacatatctgaaaattgcggcattactacaaccggggtttccttttatctccctactgaaacgtttatgaaatgtagtcagaattatcgcattatgtcatattcgtttaatgttttaccgagttcccttaatgatgttgaaatggcaatagatgaatacatgaatagcgttggttctaattacgaatatcaatcaaaggccatatatcagcaaagatttgaacagcaaaagcagatgtggcaaagtgttggtgttttcgttagtcttgtaataggagtgattggaatactgaattttataaatactattattacggacattatagcaaggagaaaagaaatctgtttgttgagatgcgttggtatgacaatacgacaagttaaaaaaatgcttgttcttgaaagtttgtgttataccgtaatgactattgttgtgacactattttcaagtatcacgcttattccactcattagtaatggaattacaaaagtgatagggatgcaataattttcttaccactataatccgacaagtctctttatagtttatgtacttctaattcttttgagtttaatcataccgttaaagggctataaatcttttataaagtaagcgtcaaataaaacagtgtaaagaaaaacaatcgtcagacttttatactaaaaggtcaacggttattgacagaattcttttaccagaggattccagggcagatcatcatccagatattcaggatgttcaagaaaagcacttcccggcatttctgacagaatatattttatatacttcattggggcaagcccattcgctttggcagtctcaaccagtgtatagatccccgcacttgcggcagctcctttcgggcagccggaaaacagccagtttttccggctgcaggagcagaatgaggtatatgtccaccggggagtggaacttctgcaaactcagatggggaatctgttaaaagagccggctgttgatgcttgagcgtatggatgcaatttttcttacggggcaggtactcaagggcaagtcttcaaattttggcaagaatgtaataataacttttcaaagagcgttcttatttaacgctacaatagagcaaagctatactctgctctatctttatatagtcatccactatttattcgttttacttccaaaaatgtctaccagaaaacgaattaacacatatattacaaacatagttgcaattattgtttcaattaaaacccaatattgtaaaatcggtatcggactacccatattcattaaacatgctattgtctgctttgaagcaatcgcactgataacaaacgggaacgtaaatgccgcataacttgggaaaaacggtaattttagatatccaatcgcttttaccaatgcaaaaatatagagaacggttgctacaacaaataatgtcaacaccatagttttagattttggtgttacagattgtatataacccgacaaacataaacttgtaggtgctgcataaatgcagattagtggttttgctgggtttggaacttctttgtattttatatatctaatagtaactaataccagcaaagcaaccaaagtaattagtccaaaccaaaacgccactgttcctaccccaaattgttcataagcaggtgccgtaattgctgcaaccgcaatgccaacatagacgatataataacttgcaaatacttttggcatttctaatttcaaaatgaatttcaccgtaaaatagacaattaaaataacatgaagtataatagccagaatccaaatataaaaggcagccatgccaataaatggttttacataaacactaagaagcatcaatgccattgaaaatgttccggatacactcgccataatcggatttttcatatcctctttaatcattcccggaaacataatcaacttcaaaagaactaatattagcaacaatgccgcaactgcaccacataatacgcgaatcccctccgagtaactctggagtaaatttcccaatgcagccattccaagcattactccgcaaagtgggacaggaactcttttaattacatttttcatctctgttctccattccttattatttactcttatgcaacaatatctttccgctcacgtggttcttttttctcatcatcactatccaaaacctcaatacctaactcacggcatacaatttctgcaactttccatgcacaaatacctgtataataaatacattggtttttatgctctcccctccccatatcaaattcgcgggtaaggacacggcaacagacagctttctttccattcatttctttaaaccaattatgaagttcgttagaatatgacatacatttattaacctctggatctttaggtcctcgtggctcagttcttccaaaaaacatcccaagcgccagaatccctccgttaagcgcgccgcacatgcatccagaacgccctgctccaacagacatagctgatgccatccctataacatcttcaggaacatcaagttcaaagttctctctcatagctgccataacagcttcacaacaaaagaatcctcccctgtaatgattttctgcgtcttgctgcaccttccttaaatttactgcttttgctccaatattcattttttctcctcctaggctttgtatttagaaacaaaaacagaataacatataaattaaaaatcgaggtattgaatattttaatatacttatacatacaaccaatgcctcggcaaaacatacaaattattcatttaattactcattgttttttgtaaaaaaacagaaaattgcgctgaaaatcaatagtttgtttcattaaacaaactatcttttgatacgaccgtcatgaatcgcctgcatccattcttttacatgctgataaaagatttctactgcctttccttgtatttgatgctttcttatcagcatacatatactccacataagaggatattccccattctcttttgcctcaaaaggaaccatcaccagattactctctttcatatcatcaaacacaaaatctacagtaactgaaatacccttctttctgtttaccattttatggcaaaggctaaatcccgatgtttcaaaaataatatttggactaaatccctcgtctttacacgcatccacaattatgtgatgaatgcggaaatccctgttttcaatataaagcggttcccctttcaagtctttgattgacacatgacttttttttgccagagggtgatccttatgtaccagaagtttaatcttaaatgattccagtactgtcacatcatatttgtctgaatcaaaattagaaattgtaaatacaatattcccttcttgattgtcaaaaagtctttctacttgatagtctggatattcgcggtaataaaattctatttccggatgtttctctttgaaaactataagacattctggagttaccaaacgcagaataccatatgcagacaaaaggtcaactattctttgatttttttgatggatagacattagttctatttccatattataatatactgcttcaatctttttcatgtgtttaaaaaaacactctccactttcggtcagttcaaacttattccctttacgttggaataattcacaatcatattccttctctaaatttcgtatgattttgctgacaccctgcggagtcatatataaaaatttagatgcctttgtaatgcttttttctctggcaaccacttcaaacacattaatattttttatatccatatttttccctcaagcattcttacaaaaattgcataaacagatacaattttaattatattgataataacatatgtgtcaaaccaattttcaaacctggacttttcaatatttaatttttacattatacattcacttataatacagatttctctatccccttcacccatctccgaagcgaatcccatcttttaagccaaggcggtagaaaaattcctcattatcagccccatcatcaaataaagcactgcaataactttcaattacttgcgacactgtgccttgggcattgaaataacctccctatgtaaaagtaaagccctgccttacgacagggctttacaaacattttaatcccaaacatttataagccgcatatgtggtgtgacacgaacgcgccccgaagggcggctcaacctgcataaaacgaacgctgcgaatgaagaaccggttagcagactattctacgggcgcgaagcccaaggaggtttccgctataccgattacttttacattctaacagcatacaacgttttgtttaatccataataagaccgccgtttacatcaaggatttctccattaatataggaaacgcagtcgctgcacagaaaggctactgcttccgcgatttcacttaattttccaagccgatgagaaggaatctgagaaagaatatccttccatctgtcatcggcaagaacctgttccgattctacccatcccggagcaacggcatttgcattaatattgtgtccggcaagttccccggcaaaggattttgtcaagctgatgacccctgctttggcagcgccataaatggacactccttttccaggattctttccatcagaagaagagatgttgacaattcttccataattatttggaagcatagatttttgaacgactgcctgtgtaacaaagaacaggccttttaaatttatattaattacaaaatcaaattgtttttctgtgacttccaggataggggaagccggatagacaccagcattattaataaggatatcaatccgtcccatggtatctactgcctgactgactgccccttcgatatttgccatatcagtgagatcgcatacaagaggcatgacccggacgcctagagaacggcaggatgagattacttcgctgtctggtgtaacagccacgtccagtataataatatcagcgccttttttggccagagtctcagcaatacattttccaatgccgttggctgctcccgtaacaagagcaactttaccgcttaattctttctctttcatatttatattctcctttcgtgataaagtttataatccgttgtgatggtatctgttccttcaggagccagcgtgcgtgacaaagtttgtatacctgtgcgttttaccgccagcataagagcataaggatctgtaatatcaacagatttttcgaaataggacagaatttgtttaaagaatcgagatccgttttttatgatctgatcggcagtgctgtcaataagatctgtattgatggtttttaccagttccggtatataggattccagctcctttgcgtattccaatgtgtggatgatttcgtccggggttgtatgtatagtcaggccccggttacccataacagtaacggcatgtccggtttcataaatatattgtccggccatatctgtgagaagacattggctaagatgtgcggtgttccgttcaacatcttgctgacagcggccaagtttgttggtgaaaatcatagaaccaacaagatttccatgatgtatttttttcagagcggacagaaacaccagtctcttaaaaggagagtggaacatgtctccataagaatgtgccagactggcatgaagaagatcctccacaatatactgctccaaaagagcatatccaatcagcataccgagatcatcagccacagggccatatccgtcatccagattggaatggatgagagtacctgattctttaaaggaagccatcagtttgattgcttttactgtatgttctgttcgagcctccaaatcagaatattcaggatagtcccatccaaaatactgggatatatttccgatggttgtcacacctgcctgtaaggcagcccgcgtattttccaaagatgcaggacttccaatcatattatcacccagatgaggctgcatataggaggaagcccctaatatatcccagtctttttgagaggaaaaataaagggcgtcaccttgccggtaaatagaacgcatatccttaggaagtgccattgcatagtcaatgctgacgccgaaacgctccaagtggagctgcttttcctgtagctgtatttccagttcctttatttgtgtctgtaattctttcagggtagggcagcaaagatgacagtgataagtaaagtttttctgttttgccctgttttttttaaattctttttctgaagaaaaaccactgcattttattgcttgtgtttttccgagagtaaacaaggattcattctcttgatgagtcataagtacctcctttgattttctttattccaaagcctgacaaagcgcagaacaacatggcggcgggagtaagcagtcccaggaaatagtagggaagataagaagaaaccgcaacacccaatgtggcagaacagtaaataccattcgttccccagggaaccatggggcagataatggtaccaccatcctccagagttctggatagaacacttcgtcttagaccttgttcgtcataacattgtccccacacattagccggaatgatcattgccagatagggatccgctgcaaagaagcttaaaagaaaagtaaggacccatgtggaaataaccagtcccggaatatggcaagtcagtttttgtgtttttgtcagaatgccatttataatgcctgtggcttgaaacgcgcctgccagggacagtgagaacagcataagagtaatcgtagttgtcatggtggtcaggccgccccgtgttacaagagtgtccacagcctccacgcctgtatttcccacatacccggaatacatataggaaagtccttccttccatgatctgccttggtagaatacggtaaaaagcagacccattccggaagcggccatcatagtaggaatggcaggaaatttttttataatcaaaaagatcataatgataagtggaaggaagagaatcgggctgatgcgaaaagaacttttgattccttctgtaatgatggatatctgctgtgcacttgaattttcgttactgtatttcaatcccaggattccaaaaagtatcaggctgccgatataagccggaccagttgtaaagagcattgatcttacatgctcatacaaatccgtttttgcgacagaagcagcaaaattagtggaatcgctaacaggagactgtttgtctccgaagtaggcaccgctgataattgcaccggctgtcagtccgacagggattttcagtccggtgccaattccaataaaggcaacaccgatggtacctattgttgtccaggaagagccagtacataaagacataatgctgcataaaataacaaccgatattaaaaaatactggggagaaaaaatttgaaagccatagtagataatggctggcacagttccgcttgacatccaggttcccacagtcacaccgatcagacatatgatcagaatagcttctatagattcagaaatattgtagatgattccttctcttatttcgctccaagagactttatgggtgacaccataaagcacgatcacagcaatactgaaaagaagaggaatatgagggctttgctgtaagattactactccatatatcagaataaggacagcaacccccagccagatagcagactctgcaaatgtatgttttgtcttaaatttcatattccccctccttcttattattccttaactgctttgtaatttccgattccgattgccgcaaaaagaatgcagatgataggtgcggcatagccgattatgtaccacgggatataggaagaaacggcaattccaagtgtggcggatacatagagtccgccagatccccagggaaccataggcgcaaaaagtacggcatttccaacatttcgacacagaacatttctgttcagacccagatcatcataggcggtgtcaagagctttagatggcaaagtcatagccaaatatgggtcagcggcaaaatagctgaaaataaaggtcagtacattcgtaagagccacaagtggagttacttttttgattagtggtgatatgtgacctaaaataacaggaatgataccgattcttcggagaactccagccatccacatagagaaaatcatcagagccacggtgctcatcatattgttcatgcctccgcgagtaataattgcatctacatcttttacacccgtatttcctacatatccattcatcagatatccaagtgcgcaagagaggctttcgtgttggaatatgattgctacaataattccagtcactgccgccacaatcattgtaggaatggcaggcagcttaatggcaatcataataaatagtataataatcggaatcaggagaagaggtgtcagatgaaaccctttttccagtccggccaatgttgattcaatctgagaggaactggacgcgttggaaccagaatagcgaagccctataataatgtaggcaacaaaactgattaaaagcgccggaatattggtgcacagcattcctctgactccattgtagagtcctgctccggacactgctgttgcaaaattacatccatcggacataggagactgggtgtcaccgaaaaatgcaccacagcaaatagcgcctacaacgataggagccggaatacccatagatacaccaattcccagaaatgcaactcccacagttccaacggttgtccaggaactaccagtcaaagtactcataatagcacaaaggatcacagtaaagggaagaataaaggacggtgaaaatatttttagaccggcccatataacataaggaactgtaccgcacgcaacccaggctccaacaaccataccaatggtcataacaataataatagcttccaggctgctggcgatggattcaaaagctttgtccatcatatctttccacgaaatcttcagatataatccataaaaagataaaagaaatgcacatgctaaaatcggaatgtgtggcgataattggagtacaaggattccaaccatcagtacgattacagcaagtacaaggatcagaatcgacatgcctaatgtaggctgtttttcttttgattgttcttttctctcaatctcactcataaaaaaaccccctgtttaaatttttataaaaataaccataaaacataaatcgcgatgttaatgttttaacaattcttattataaatttcaacacacttaaattcaatgtctgaaaccttatttgttatatcaattttgttctactaatttggagaaaaaagacaaaaaaacaagtgctaagtgatgtaaaaacaaagacatatttcatcaccacttagcacttatccttagaaagaacagagtcttagagaagctgactttggtataaggaattccagatacaaaagcagatataaagaaaaactatagcaggctgtcaagattctctcttacaattcgaataaataggttggcagtttggcttaaagtatgattcttaagaaaaaccattcccactgtgatttcttcatctgttttaaaagggattgcgacgatatcttcgccctgaaggtctttgtcaatcattttagtacaggttgtaaaaccattcagagtatgaatcagataaaacaaagtactgcggtcgctgacccggatgtttttcctatggtcaagtatatccaaagtttcttcagaaaaatatctggaattaaattctccctttccaaaagaaagaaaaatataaggtcgaagatcccggaattgaatctcttttttagaggccaggggatgatttttgcccacaagaatataggaggaaactgaaaaaagctctgtaaagacaaggttggcttctctcaaatgacgctgtatcgtgggcttattaaaaggattcatgtacaaaataccaatttcacttttatagcattttacatcattaatcacttctgaaaccgttgtttcccggaatataaaatcaaattcctccggatttagttcctgcacaagctgtgaaaaggcattcacagcaaacgtataatgctgtgtggaaatcccgaacgttttcttttcagaagaagaagtgccaagatactgctgttccagcatcttttcctgctctacaatctgggctgcatagccgagaaattctttccctttcggggacacactaattcccttatttgtgcgaatgaagatatcgaaattaagctcattttccaactcccggattgcatttgacaggctgggctgagaaatataaagactcttggccgcagcattcatggaacctctttttgctatttctatggcgtattttaactgttgtaatgtcactgtttccccctccgtttgatgattataaattctcggaattctcagcccttatttttcaaagcttcccatccctttcttcagaaaaacagcatagattttcgagtatctttttataactatcacgaaccgtcaatatatccctgtttataagggtttgacggtctttcttcatattcatgttacaggtacactgcgcaactgaacctaactacgcatatttccgccgtaaaacgttgtataaatcgttgtaaattacgctatcagacttcgcatttctctgtttgctcctgcctctgacgcatgggcgtataagtccagcgttatcgttatgcttgcgtgtcccatgatatactgtaaattcttcgggttcatgttcttccgtgcaagcggtgtacagaacgtatgtcttaggctacggggcattatcttcggcaacggcgttttctcatggttcttgttgtacttcttcacaacaccgtccagcaccgatttataattgctttcctgcatagggagccgttgggactgatgaacagaaaattacggtacccgtctatctctttgaacgttggcttctgcttccttttcagcacccgtcgaaaggctttctctgtttcctcgctcataggcacgttgcggaaatcgctcttaccgtgggcggatcactccgttagtttgcgagattttgagtttatcttccacataaactggatttgtattctaattcaagtataaaatcattacttcctgttgggctttctttttatttccagcagtttaacgaaatcaccaaacaaggttgtatccgttggctcaaacatcagccattttccgtcatgataggttttagtttcatcataaattttttgaacttcttttgaataattatttctatctgtttcgaattttaatctttcatctttccctaagataatcataaatcctacgcagttttctcttgcgtacaatgtacaaagcgtttttccgcctcgacggtacttatactcataagtccacgctttaccacctttgttccacaagcattccatttcatatttttcatcaattaaggtacacagtttattccatatatcatataatgattgtccgactaaagcagtcatttcctctgccttaggtattttatctagcatactcgtttctcctttacaatttccgatatgtctttacaatcattatatcatgcttctttcagcattgtcatttcttttctgcttttgaaaaactacttattagcctctgttttgtaaagagtgctgttcagcacctctctgatagatttagtgtttatgcggatattctcgatttttcgcccgtttttattattgaaaatcacccactattttcgccaaaaggcttgacagatcactcaaaatttacggcgaagccgattgaatatattctattttcatcgactggaggcgatttttatgttcccttgtaacatcggcggccatgccgcctatcaggattttggcctgactgaaattttccatttctacccagatcccttatgctggaacgttattccaaacatgggcctgctccaagaattccttcctgcatgcttcgttcctgcctgttatccattaaatttaagattacttctattacccgctgagtcgctttactcaaggaaaatcctttgtacgctatacttagcggtttctcctttggcgatgttcccggtattggtaccttttattctctcgtctgtgggattctgattctaataaccaatgttccgattgataattcagcaagtttatcttcaggaaatctaatatttccagccccctgtgtgccgctcctatatcatatccaccgtctaaaccaatttcctgatatccacataattgtccttgtttctatacacttcagaacaatctcattaaaaatttcgcggaggatactggcatccttaaaacatcgttttcggttctggctgaaaatggaatgatccggtactctgtgcatgagatcaatcccacaaaaccaacggtaagaaaggttaggtgatacttcctcatcaagccttcgctctgattttagatcaatagattttcttcctgaattagaataataaggagcagctttttcgtatataaaatcaaagtttacacatttttaatctgtctcagaagatgattctctggaatcatggaatctatatcaaggattatcatttggatttgtcgttttattcccataataaaaagtgacctcctgcaattgatataataagtataccatacagaaggtcatttttctttagtttgtcaacaggtcccaagtttcacactctcacggctacttctgagtacgtggaagaaatcaaatccctgcctgtgaaacgtcaagtttctgtcagcggaacactgaaaaaattaggcgtttcacgttcgggttacaatgcatggaagaaacgggttccttcggacacgtctgttcgtcgtgcaatgatcaccgccttctttcggtcagagtattttatattctgccctttactaatctcgagagctccattcaaaaaaacggctgctactgggcttcctgcacagggtaaaagccacaggcgtatatctctgatgtctccaatccctttatgagttctttctcctcgcctgttaaggtatcctgacccttgtctttcagttcttctaataaatctctttgaagttttgactggataagtattggtatctttaatgtacgttcaatctacccgttagcatttttatgaaaatcaaacgtttcctccgcatctgttacattcagccagtgagattcatgtctctacatatttttttacattctctgccgcatccaatcagctggaatggatagatataccaatgagcataaatatcgtcattatcgccttttttatttagcattagtaaatcaattgtatatgaataatttcactaacattttaatttattttatacaacaaaaaagcccgcaaacactagttttacggacttttcaaactccccgagttgggctcgaaccaacgacccttcggttaacagccgaatgctctaccactgagctatcgaggatcatgctatctgtaactgaagaaaagcacccgcctccacactttagtatgacctcctggtgccctatatataccttcaaaaccgcatacgggaaatacttccatccgaaactccaactccgagtctttttctgccttccagcctctctggtcatgccctcgaccgattagtaatagtcagctccatgcattgctgcacttccacctctatcctatctacctcgtcgtcttcaaggggtcttactggcttaacgccagggatatctcatctcgaggggggcttcacgcttagatgccttcagcgtttatcccgtcccggcttggctactctgccatgcgcctggaggcgcaacagatccaccagcggccagtccatcccggtcctctcgtactaaggacagctcctctcaaatatcctacgcccgcgccggatagggaccgaactgtctcacgacgttctgaacccagctcgcgtaccgctttaatgggcgaacagcccaacccttgggacctacttcagccccaggatgcgatgagccgacatcgaggtgccaaaccactccgtcgatgtgaactcttgggagtgataagcctgttatccccagggtagcttttatccgttgagcgatggcaatcccactttataccaccggatcactaagtcctactttcgtacctgctccacccgtcggtgtcgcagtcaagccctcttctgcctttgcgctctgcgaatggtttccgaccattctgagaggacctttgagcgcctccgataccctttcggaggcgaccgccccagtcaaactccccgcctgacattgtcccccagccggttcacggctgctggttagaaacccagcactgcaagggtggtatcccaacagcggctccgcgacgactggcgtcatcgcttcctagcctcccacctatcctgtacatgcaataccggatcccagtatcaagctggagtaaagctccatggggtctttccgtcctggcgcgggtaaccagcatcttcactggtacttcaatttcaccgggtgcattgtcgagacagtgcccaaatcattacgcctttcgtgcgggtcggaacttacccgacaaggaatttcgctaccttaggaccgttatagttacggccgccgtttactggggcttaagttcaaggcttcgatcgctctaacctctccccttaaccttccagcaccgggcaggcgtcagcccatatacctcgccttgcggcttcgcatagacctgtgtttttgctaaacagttgcttgggccaattctctgcggccatatctctatggcactccttctcccgaagttacggagtcattttgccgagttccttgacaatgcttctcccgtcggccttaggattctctcctcatctacctgtgtcggtttgcggtacgggcgcgatatgagcgatagcggcttttcttgacgcatggctcgcatacttccctacttgcagttcggtacgcgtcacggcttcgggttacgctgcacggatttgcctatgcagcccctgccccgcttgcgccggtctttccattcccggcttatgctttccacgcgtgtccccacagttctgtcatatcgcggtacaggaatctcaacctgttgtccatcggctacggctcccgccctcgccttaggccccgacttacccagagcagatcagctttactctggaaaccttggatattcggccggaaggattcccaccttcctctcgctactcattccggcattctctcttcgatgcggtccacggctccttccggtgccgcttcctcccgcatccaatgctcctctaccgatgtacttggtacatccctgggcttcggcagtgtgtttcagccccggacattttcggcgcgggacctctcgactagtgagctattacgcactctttgaatgcatggctgcttctgagccaacatcctagttgtcttcgaaatcccacatccttttccacttaacacacattttggggccttagccgcaggtctgggctctttccctttcgactgcccaacttatctcgtgcagtctgactcccatacatcatctacgcggcattcggagtttgatattcttcggtaagctttgacgccccctaggaaattcagtgctctacctccgcaagactcgtatgaggctagccctaaagctatttcgaggagaaccagctatctccgggttcgattggaatttctcccctatccacacctcatccccacccttttcaacggatgtgggttcggtcctccattgccttttacggcaacttcaacctggacatggatagatcacccggtttcgggtctactccggctgactccttcgccctcttcagacttggtttcccttcggctccgggcctttagcccttaaccttgccagccggcgtaactcgccggaccgttctacaaaaagtacgcggttgggcacgtaaggcccttccacagcttgtaaacatatggtttcaggttctctttcactcccctcccggggttcttttcaccgttccttcacagtactatgcgctatcggtcactaaggagtatttagccttgcggggtggtccccgcctcttcccacaaggtttctcgtgtctcgtggtactctggataccgccgtgtctgtcaggctttcgcttacggggctttcaccctctctggccggctttcccaaagccgttctgctagccttcccgaatcacttccgcggtccgaaccccggggcgcacgcgccccggtttgggctcctccgtgttcgctcgccgctacttacggaatcacttgttgttttctcttcctccggctacttagatgtttcagttcgccgggttcccctccctgcgttatggattggcgcagggatgcatgagggctcctcatgcgggtttccccattcagacacctccggatcaaagggtatttgcccctccccgaagcttttcgcagcttatcgcgtctttcatcggctcttagtgccaaggcatccaccatatgctctttctagcatgaccaagcggacttaagcgcacgggcggcgcttcgatcctacgtcggcatagcgttgccggcgttggccagtcggcattttttctattcgttgcctcgaatctggtttgttctgaataatcgcttccgcgattacctcggatgtcttgatctagatattgatcttttttctatttccatgtatgcggttttcaaggtacatatgcgatgcgcgtcgcgcatcgagtggagaatacgagattcgaactcgtgacctcctgcttgcaaggcaggcgctctcccaactgagctaatcccccgtctggcattcgcttccaccgtcatcttctaacggcgcaatgcgtcactcttgctaggctcgaaaaaacctcgccaagcgcggtgacatgcctacgactagattcaaacttcgcctccggctcgttttcatcaagttctctggctatgggcttaagtggactcgaaccaccgacctcacgcttatcaggcgtgcgctctaaccggctgagctataagcccgtctatatcagaaaggcttccgccttctctttccttttgattctggcagccacctgctctcccgtaccgtctccagtaaagtaccatcggcctcccagggcttaaccatcgtgttcgggatgggaacgggtgttgcccctgggcgtatcgccgccagaaaatcgcatcgagccttcttacggcgccctatgcctcttccagcattcctcgataactgaacaatagacagcagcccttacttcttctcttccctagaaaggaggtgatccagccgcaccttccgatacggctaccttgttacgacttcaccccagttatcggtcccaccttcgacggctccctcccttacgggttgggtcaccggcttcgggcgttactgactcccatggtgtgacgggcggtgtgtacaagacccgggaacgtattcaccgcgacattctgattcgcgattactagcgattccagcttcatgtagtcgagttgcagactacaatccgaactgagacgttatttttgggatttgcccaccctcgcgggttcgcctccctttgtttacgccattgtagcacgtgtgtagccctggtcataaggggcatgatgatttgacgtcatccccaccttcctccaggttctccctggcagtctctccagagtgcccatccaaaatgctggctactgaagataggggttgcgctcgttgcgggacttaacccaacatctcacgacacgagctgacgacaaccatgcaccacctgtcaccgatgttccgaagaaagagcgcgttacgcgctttggcatcgggatgtcaagatcaggtaaggttcttcgcgttgcttcgaattaaaccacatgctccaccgcttgtgcgggtccccgtcaattcctttgagtttcattcttgcgaacgtactccccaggtggactacttattgcgtttgctgcggcaccgaatggccttgccacccgacacctagtagtcatcgtttacggcgtggactaccagggtatctaatcctgtttgctccccacgctttcgagcctcaacgtcagtcatcgtccagcaggccgccttcgccactggtgttcctcctaatatctacgcatttcaccgctacactaggaattccgcctgcctctccgacactccagccacgcagttccaaatgcagtcccggggttgagccccgggctttcacatctggcttgcatcgccgtctacgctccctttacacccagtaaatccggataacgcttgccccctacgtattaccgcggctgctggcacgtagttagccggggcttcttagtcaggtaccgtcatcttcttccctgctgatagaagtttacataccgaaatacttcatccttcacgcggcgtcgctgcatcagggtttcccccattgtgcaatattccccactgctgcctcccgtaggagtctgggccgtgtctcagtcccaatgtggccggtcaccctctcaggtcggctactgatcgtcggcttggtgggccgttaccccgccaactacctaatcagacgcgggcccatcttgcaccgccggggctttggccgccgcgccatgcggcgcttcggtcttatgcggtattagcagccatttctggctgttatcccccagtgcaaggcaggttgcccacgcgttactcacccgtccgccactcagtcgcaaggctcctcgttccgaagaagtcggggccaggcgcttcgttcgacttgcatgtgttaggcacgccgccagcgttcatcctgagccaggatcaaactctcgttaaaagttgtgatcgcggtcagaactaactcttggctaattccttcccgttattactgttttaaggtcggacatctctcgatgtcccgttctgttctgaaattctctcttttaagaaattttcagggttgttgtctattgttcaattatcaaggttctgtgttgtctgtctctcacgagtcagcctagatataatatcatcctttgtcataatatgtcaagaacttttttcgatttttttcaagcattttttcgcttgttttttcatacacaatatctgcatataacaatctactcaaaccactatgtgtaggcttgtcagacaaacggagaaggagggatttgaaccctcgcgccgctattaacgacctactccctttccaggggagccccttcggccagcttgggtacttctccaaatactgctcgatcatgtgcttagcacgatgacgtatataaaaaactaccagcaaaccggttggtagtttttcaagcggagagggtgggattcgaacccacgcgccctctcggacaaacggttttcaagaccgcctcgttatgaccacttcgatacctctccacatattcgatttttgtcgttttatctcaacgacaatatgcattttatcacacaaagaatctagcgtcaatatctaattttcaagaattgctatttttttctatatagaaatacttttgcgatttccagatcttccggcgtggtaattttgatattttcataagagccttcatataattttaccgatacgttcagcatctgttccactaccatgccatcgtccgtcacacttatagattcttcccgcattagcctggaatatgcttcaataatcagagaagtttcaaaaacttgcggcgtctgtaccgcacgcacgtattttctctccggcgtctgtaccgtacagtcttcctcatccaccagcttgatcgtatccttgcacggcatccctgccacgcaggccttacatttccggacggtttcatagccccgcctgatgatatctccatctacgaacagtcttaccccgtcatgtataaatacgtagccatcctggttcttaaccttcagccgtccgtcctgaataacctttagcgcctgccatacagaatcataacgttcctttcctccaagcactatggcatccactttggtaaaatgatactcttttacaagtttgctgcagtcatggatctccttttctgatcccacaaccagtatgatgtcatcaataatttccgaatcctgaaaggctttcaggctgtaataaatcacaggcttcccttccagttctatatactgcttctgtacatcagcgcccatccgctttccctggcccgccgccagtatgattgccgtacaccgcttcttatcttttgcttccataatgtatatccccgatacttcctatctttctcctaatttcaggtttggaacagcattcaggtcccatccatgccttgtcccattcctatattcatagtatgccgccactccgatcatggccgcattatccgtgcagtagattggagatggataatagaacttcacgccccgctcctggcatgcttctttcatggcttctcttaacgcgctgttggaggcgacccctcctgcgatggcgaatttgtcaacctgatattcttccactgcatgtatggcatttgccaccagcacgtccgtgactgctttctggaaggaagccgcaatatcagcctggctgtacgcttcccctttcatcttgcatccattgatgtaattaagcacggcagactttaccccgctgaaactgaagtcatagggcgcgtcctccacatgggctcttggaaatgcaatggcttccgggtttccttctttggacaccttgtcaatcttcggcccgccagggtagccaagcccgattgcccgagccaccttgtcaaatgcctctccagccgcgtcatcccttgtcctgccgatgatgtcgaatttgccatagtcctttacccgtaccagatgggtatggcctccagacaccaccagggaaaagaatggcggctccaaatccttatgctcgataaagttcgccgcaatatgtccctcaatatgatggacgcccaccaagggctttttagccgcgtaggcaatcgcctttgcctcggctacgcctaccagaagcgcgccgacaagtcccggaccataggtcacccctatcgcgtcaatatcatccagggtagtgtgggcttccccgagcgctgcctctattacctggttgatcttctctatatgctttctggaagcgatctcaggaaccactcccccatacagcgtatgcaggtcaatctgggaggatatgatattagacaggacttccctgccattttttacgacggctgccgccgtctcatcacaggaactttcaattgccagaatcaatacatcttttttttcactcataatcaaagcctttcatcattgcttccgaatctatattaatcagaaaatacaagttccgcgcttctgcgatcctttgccgcaatcgcttgggggaatatggcccttacttcgtccatatattcttccggcctggtcagggaaggactataatgggtcagccacatctccttaacgcctgcctctttcgcaacctgggcagcttcatagaaggtcatatgcttgtattcttttgcttttttcagtttgtctttctcgccgtacattccctcgcatatgaatagatccgatccggccgcattattcttcatggattctgtgggacgggtatccgtacagtatgtcagcttgatgcctttgcgggcagggcccagcaccatatccggcgtatagacgctgccgccttcttccaccgtctctcccttttgcagtattccccagtatttctgaggaatgcctgccgcatttgcccgctccacgtcaaacttcccggcccggtcaatctccatgctatagccgtaacaggtcacattgtggttcacacgaaatgcttttagccggtagccattcatctcgaatgtctgctccggctctgtaatctctatatatttgatagaaaacggcagctcaggcgcaatgacccgcaatgaattcactacccgctccaggcctttcggccccactaaggtcaacggctctgtccggtcggcattccccatcgtaaggagaagccccggaagcccgctgatatgatccccatggtaatgggtaaaacagatgacatcgatcggcttgaaactccatcccttttccttaatcgcaatctgcgttccttccccgcagtcaatcagcacgctgctgccgttataccgcaccataagcgctgtaagccagcggtatggaagcggcatcatgccgcccgttcctaacaaacatacatctaacatattttacctcaatttcctactttgatttgaaaactttttaccaattcatcatagcagtcttcgcagaggtcgaattgatctatctggttatccttcctggagaaatatccccagcgcttgtttacttccagcacatcctcctggggaacccctcctttgacttcaatctccctgccacatttattgcatatgatcttctctatcttctttgtctcttctatctcttttctatactggcgcatacaattcctcctgtgagtatcctatcacttcttctttcttgctacgccttcattatatctgtgcccatcggtttttcctagtgggaactgctgtcagtgctgccagttatcttccaagtccacgactcataagtatagcatcttctataggattcgtatagaaatttttgcgaactccatcttctttaaagccacggctaagatagaatctaagtgccgccgcattgctttttcttacatccagcatcagtcttgcaatgcccttgccggctaagactctttccatctcatcaagcagagcaccggcaaccccttgcctccggaacttttcatccacggctatccgggcaatctcgctttcatctgccgcaaaataaacgatcacatatcctgccatctgcccgtccagccacgcgcctaatatctgtgcctgtttctggttccaggtatccctaagagccgtcaggctccaggggtctggaaatatctcctgctcaagcctggcaatctcctcgatctcctgttccttcgctatccgaatctccagcatcctataaagcctcgatatccgcaatcagcgcatctactgcttctttctttgtcgcccagctggtacagaagcgaaccgcgctgtgggaatcatccacaacctcccagaatccgtaagagtatttttccttcagtttcccaagatgctcattcggaaggatcggaaactgctggttggtataggaatcatagcgcaggccataccccttctccaaaaatgccgccttaagtcgcatcgccaattcatctgcgccttttgcaatatcaaaataaagattatctgtgaacagcacgtcgaactggatacccagaagcctgcccttggcaagcatccctccatgctgcttgatcagatagcggaaatccttcttaagcgccggattcgtgatcacgactgcctcgccgaacagggcgcccactttcgttcctccgatatagaatacatccgtaagttccgcgatatccgtaagtcccagggaactcttttctgccatcagcccatagcccagcctggccccatccaggaataatggaagtcctaattccctacaggttcttgacagtgcctgcaattcttccttcgcatacagcgttccattctccgtaggatgggatatgtacaccattcccggctgtacgatatgttcatggtccgcatcattccaatgcgcctcgtatgcttccctgacctgagccgccgtaatctttccatcctcgcttggcaatgcaagcaccttgtgtcccgtggcctcgatcgccccggtctcatggacgttgatatggccggatactgccgcaagcgctccctgatatggacgcaggattgcgctgatcacggtaaagttcgtctgcgttccgcctaccaggaagtgtacgtcagcctccggcgcattgcacagtcgccgaatcttcttcctggcgctctcgcagtatggatcgttgccataccctgccgtctgttcataatttgtctctttcatcttctttaatatagaaggatgtgccccttcctgataatcacattgaaatctaagcatgacctaacctctctttccgctctcgttctgcctgggatacccgcagataatctggctgatgctctgcggctgtctccatcttcccttctctataatatcttatggcaagcgcccctaccgctgctgcccgctggcggttcagatgggcaggcgcaaaagcgatctcccggcctgccatgatccgctccatcagcgcctccttgaagaccggtactccgtctcccaggaatacgaccttcctgtcataggaatgaagccgttgccccaattcctctatgccaactgccatctgatcctccagcacgatcagcctgtcattatcaaattcgtagattcccgtgtagacttgtcctcgtctggcatccatgatcgggcagacgatatgatcggtgccgcacaaattataagccagcccctccagggtaggaatatgaatcagcggcttatcaagcgcaagcccaagccctttggcagtggccgagcctattcgaagcccggtaaaagatccggggcctgccgccacggcaatggcatctatgctatccagatccagttccgtcatccttgccacttcatccagcatgggaagaagcgtctgcgaatgcgtctttttataatttaccgtatattcggcgatcgtctgtgcctccagcccactgccgtctaccactgccacgcttgctaccaggccggaactgtctaacgctaatattcgcatatgcttatcctccgataatcaaatcctttttccaaatccttctctatctttacctccgtataatgctgcggaagtatctcttcaatcaggttggcccattcgataaggcttacgccctcgccatagacatagtcttcgaagccaacttcatccatctcttctacatcgccgatccggtagacatcaaaatgatagaagggcagacgcccttcctcatatacctgcacaatggtaaatgtggggctgcttaccggctcctcgatgccaagtcccgctgccagccctttcgtaaatacggttttgcccactcccagatcgcccaccagcgtgtagacttggccagcccgggcctcttgccccagccggcagcctagttcatacgtctctttctcgcaattggattctatcaccattctttaaaacccttcctatttctttccatccagccggcggattctcaccgcaggcgctggcatgtttgcatagatcagatccaccactgctgtgtactgatcccccatctggtcaatgggaagcacaatggcctgcttttccgccgtatacaatatgataatccttttcctggcaaccgccctcttgaacttactccaggaagccttgccactgtcatcggcagtcgttgtcgtaatgcctccgtcgtcaaattcataggtcacaagcgcacccagcttcttggaattctgcatctgctttgccacttttcttctgataaaatacgggaagatgcccagtagcaggaatgcaaatgcaaggaacataagcaccagcaaaaaatcccctttcatgataaaacttaccgcaagccccatattcaggactcccagtatcagagccaccattcccggcccgcttgtgtaaatattatataccataaaatccgccattgaatctacgtccagctttacttctactttaaccggcatattccttcctcctgtctcttttgctcatttacgctccctcttgatagataaactatttttaattatagcatatctttttttcttctgccactgatgatatactaattttgtattcaatgacaacatcgtttgaggaggacagattcatgaaattcacattttaccacaacaatattaacgtattagatttggaaaagtcggtagcgttttaccagaaggctcttggccttgctatcaccagagaaaaggaggccgacgacggaagtttcaagctggtattcctgggggatgaagacactccccatctgctggaacttacctggctcagagatatggacaggccttataacctgggcgacaacgaattccatcttgccatgcggacagatgacatggaagcggcacatgcacttcatgtagagatgggctgcatctgctttgagaatcctgacatgggaatctatttcatcaacgacccggacggttactggatcgagatctgcccggccagataatgaaagccgcccagatcagcaaaacgctgttccgggcggcactgtttttaaagcttgtatgattccaagcggattaatgtcccatcttgaagatcggactgatcttcttatagatcaaaaatacgatcatggataccagcactcctttaagcagattaaatggcgccacagcaaacaccacgaaagtggacagtcccgtaatcttgccattgatcgcgcttcccattcctaccagcgcgtcaatgggcatgccaaacgcttttgcgtaggtgggcagaaggacgaacgcattcaagaagcagcctactaccgtcataaatacggttcctgccgccataccgacaatcgccccattcctggtctttttctttttatagataagtccggccggaatgataaatgcgcacccaatcaggaagttggccacatccccgacgcctgcggttgtcgttccgctgatcgccacgtgcagtatgatcttgatcaattctatgactgcgccggcgaatggtcccattgcaaagcatcctaccagaaccggtacctcgctgaagtcaatcttgtaaaatgccggcgcgaagggaaggggcacctcgaactgcatcagcacgacggaaatcgccgccagcattccaatctgaaccatcatcctgacctttgttcttgattttgcatttgcgtttgtaattacatctgtactcattttctttctctcctttttaatgaaaattgaaactgtcaaagaaagaatatcttcttggaaccatgtaactgccgccagtccatgatgcatcgtattgcataaaaaaccccgatgccttggcatcggggtctgattgcaccataacttgtcattacataattcttctctcatccagactttactgtcggttccggaattgcaccagatcagccagcgcggataaacgcgccgggtcgcggactataccgccggttgggatttgcacccgaccccgaagaatctctttcagttctctcctattataactccttcgtccgcaatatgcaataactttatagcggcagatccgtccagttccctgttccagcgctctcgcgatgacttctccggtctcgcaggtgtttttcagataatcgtagtccttgcttacgccggtaatacggctcacttcttcgacggtatactttcgttccatatccctaccctttcctgctgaaaaaggattatcattgtatcgctctaatgttttctggcgtagcctgtcagtatcaaagtaagcgctccgtctccggtaacattgcatgccgttccaaaactatcctggagcgcgaataccgtcagcatcagggctgtgccagactcatcaaatccaaggatgccgataatcaggccaagggatgccataacggttcctcccggaactcccggcgcgccaatcgcgaatactccaagcagcaggcagaacagcaccatagtccccaaggaaggaatggttccatacagaacctgcgataccgtcatgacaaaaaatacttctgtcaggacagagccgcacaggtggatattggcaaacagcggaatcccaaagtcgaccatatcctctttcagcggcggctgggacttcttggcgcatcttaatgccacagccagggttgccgcagaagacatggtgcctaccgcggtaatataggccggtccgtaattcttaagaactttccagggattttcttttgcatataggcccgctaccccgtagagaattgcaagccagatataatggcccgccatcacgatcagcaccacctggataaaaacaggaagctgctttgttatcgcgccttcataggcaaggccgcagaaagtaaatccgataaacactggaagaatcggtattacgatcttcgtcacaatgtccagcacgattttctggaattcatccaggaccagggttatcgtctccgccttggtccacgccgcgccaagtcccaacatgaccgacaggaccagcgcgctcatgactggcatgatctgcggaatatccagctggaatattacctccggaagttccctcaatccatctatttcagatacgattgacagatggggaattatcccgtatcctgccgccatggatcccagagccgccaggaccgaagaagcatatgcgatcacgatagccacgccaagcatgcgggaagcattgttccccagcttggtaatggacggcgcgatgaagccgataataatcagcggtacgcagaaggtgatcagttctccaaggatgtatttaacagttaccacgacattcataaatgcttcgttcgccgcaagccctgccgcgatgcctattataacgcccagtatcagcctggccggcaggcttttcatgattcttttcattgatgtctctcctatcagtctgtttattcttcaatcatcatcttaatgatctcttcattcgtctctttcattccttctttcccaagacggccgatattgtgtatggtcgcctccactccctttgtcacgattccatcgcctgcgtagaactgctgtccccgcaggtacatattatagcccagaatgcctgcgtcaacagatgccgctatcttggccgcgcaggaggctttggctccatcgcagaccatgccggatacaattgccagcgcattgaccaccgtgtggatgacttcctcatagccgccaccgcacaagtaagcgattcccgctcctgctgccgccccggcgctgaccgctccgcaataggccgacagcctgccgattcctgtcttctggtggatggcgatcaggttggacagcgccagtgcccggtacaccttctcctctcccgagttcagttcttttccgtattccagcacaggcagggagcaggtcatcccctgattgccgcttcccgcgttgatgatgaccggcagctcgcatccgttcatacgggcatcagagcctgccgctgccatcgccttcgccctcgtgcgcacgtcatcaccatatgtatccagaagaacgcttccgatgttggctccatagtcgcccctgagcccctcgtttgcaatagcggtgttgtaattgatctgtcttgtgatgatttcccggatgtcgtccacgtcaacgatattaatgaattcccagatatcctctacatttagaatgcctctgtccgtcaatccttcttccttctcgccctccaccggtacaaagtagcgcacttccccgtccttttcaatcagcacgatattggtatggtagttggcgatccgcaccttcgcgtaggaatccccttttcctacggtgacctggatatcaaaggtaatcccattgtccacatgccggacgccgatggatgccgtatttaggaattccaccatccgctccatctgctccttgctaacttgcgcgatcacctctaattccttctcggctctgcccgctataatccccgctgtcgctgccgccggaattcctttgaggtgattggtattgggtacgatgacgctctttacgttcttgattatgctgccgctggcttcgatcactaccttatccggcaggcatcccagtacctccctcgctttcgccgccgcatacgcaagggcgatgggctccgtacatcccatcgcaggaaccagctcttctttcagtatctggacatatgcctgatacttttcatccgctcttttcatactaacctctcctttgcaaatgaatttaattcctttccattgtaaatccccgtccgcgtacttcattgatctgggaaatcgttatgaaggccttggggtctatattttgaatcatttcatttactaaatacagttttcgcccgggaatcacgcacagcacgcccttctgctgacggtgcccatatcccgtctcgatgtgcaccatagtggctcctacgtctacctccaaaagcatccggcgtttgacttcttcgtacttatccgatatgacaaacagctggatctgggattttcccatcagcatgacacggttcaggatcagcgtattgagcacaagcgcaagtatgccgtacaatatctgttcggagtccgcgaagaatgcctggaaactaaggaccaggaaatccacgatgtatagcagcacggccacggatacatgaagccatcggttcagcaccagcgccagtatatccgttcctcctgtggatgcccccacccgcacgatcaggcccacgcctattcccagcaggactcctccatatatggtagcaagcatgacattgtccgtcaatctggtgattcctggaattgcctgcattgccgacagaagcgcaggatagacgaatgtgctgataatcgtggtgacaataaaggtcttccccaaaatcaaggctcccaggataaagaggactgcatttacgcagaaaatgatcaaagacagatccacatgcagataatggcttatggcaaggccgatgccggtagcgcctcccataatgatcccgttgggcactatgaaggcggccactgctgccgccagtattgcgtttcctgccagtacgcctgccaatgtcttcaggctcttcttccaccttttcttcatctcttaccagtaccccctcttctatattattattagatgcccttcatcgtaagctggatccgcttcttcttaagatcgacgcttaagacttttacatctacgatatctcctacgctcacaacctccagcggatgcttgatgaatttcttgtccgttatctcggagatatgtaccaggccgtcctggtggacgccgatgtctacgaatacgccaaagtcgatgacgtttctgacggttccctttaatatcattccctccgtcagatccttcatttccagaacgtccgtccttaggatgggctttggcatctcatcacggggatcccgggccggtttctccaattcctttacgatatccatcaaggtaatctcgccgatttccagttcttcggcaagggatttgtaattcttgatggtaagagataagcctgtgagttttcccccatctatatcttccggcttatatccctgcttcttaagcagtctttcggctgcctcataggactccggatgcacgctggttccatccagaggattgtcccctccctggatccgcatgaatccggcacattgctcgtaggccttggggcctaatttggccactttcaggagctgcctgcggctggtgaacttgccgttttcctcccggtacgcaacgatgttctttgcgatcgccgcggatatgccggagatgtaggccaaaagaggcgcggatgccgtattcagatcaacgcccaccttatttacgcagtcctccacaacgccggagagggcctcgctcaatttcttctggttcatatcatgctggtactgtcccacgcctatggacttgggatcaatcttcaccagttctgccaggggatcctgaaggcggcgggcaatagaggttgcgcttctttgtcccacgtcaaacttggggaattcctcggaggccagcttgcttgcggaatatacggaggcgcccgcttcatttacgataacgtactgtaccttctgaggaatctctttgagcaattccacgatgaacatctctgattccctggacgccgttccatttcctacggatatcagcgtaatgttatacttctttataatctttttcaacagatctttggatgcctgaatcttctgcggcgtggttggcgccgtaggatagatgaccgtcgttccgatgacctttccggtaggatccaccactgccagcttgcagccggtccggaatgccggatcccatccgagaacggtctgtcctacgatcggaggctgcatcagaagctgttccagattctttttgaatacttcgatggccccgtcttctgccctctcggtcagctcgcttcgaatctcccgctcaatggctggcgcgatcaggcgcttgtaactgtcctccgtcacatctttaaggataggcgttgtatatggattttctccatggatcgtcttcttctgcagatagcgtatgatatcttcttccggcgcttcaatcttcaccgtaaggaacttttccttctctccccggttcagcgccagaatcctgtgtcctgccagtctgcctaccggctcttcaaagtcataatacatctcatagacggattccgccttctcattcttcgctgcagagataacccgtcctttctgcatggtgatcttcctgatccagatacggtaatctgcctcatccgatatgttttcggcaatgatatcctttgcgcctgcaataacttcttctacagtatgcacttctttttcaggatttatgaactcttttgccagatcttccaccggcctttcggtcttttgaaggctgatgacagcggccagaggctccagccccttttctttggcaatcgtggccctcgtccgccgcttcggccggtatgggcggtataaatcttccactaccaccagggtttctgctgccagtatctgctgccttaactcctccgtaagcttgccttgctcttcgatgctggaaagtacttgctcctttttctcttccaggtttcgaagatacgtcagtctctcatgaagccttcgtaactgttcgtcatccagggtgcctgtggcttcttttctatatcgtgcaataaatggaatcgtgttgccttcgttaatcaatttgacggcggcatccacttgccatctctttactccaagttcttctgtgattttctgattaatatccatgtcatgtatcctttcctgctaatgatgtaatgcctgttgctgataattataaccgatctttcccaaaaccgcaatgcatgcctctttcaggacagtcatttatggcaggctatcttatctgattcggggaataccgagttcactctgttttgttgaaatcccctctccactatgatatacttaagacaaactaacagaggtacttcaaaggggaatataaactatgaatcagataacgcaagaactgtcaaagcagcaattgaagtcaaaagaaaccaaggcaaaaatcttccgcgccgccaagcatatcctccaaaagcagggatatgagcaactctccatcaagaatatctgcgaagaggccggcgtatctaacggaagtttctatcaccatttcaagactaaggatgatcttctgtcctactatatcgaggaacagcccagcatcaatcccgatcttctggacatgccccgaaatgccgcggaggccaaggccgcgatcatccaagtgtacttgaattatgtgcattactgtcaggacttgggcgtagaattcatgtccaattattatacgcctaagaaccaatccttaaacccattgatccgtacggaaaggccctatcccatcgtcacggtccacaactatctaaaaaaggccattgatgcggacatcataaagcctgatctggacctggaagatatcaccacggatatccgtatgatcgtcatcggcaacgtatttgaatggtgcttaaaaagcggcgaggcagactttgagggaaacatgaggcgcacgcttagaatctacttagacggcctgttctaagggtttccataaccatatgtcaggaggaagattatgtatatattcataaccaatcccaacgcccgctccgggctggggcataagatatgggataatatcgagaccgttctgaagaaaagaggcgtctcctaccaggtatattttacaaaataccagcagcacgccaccaagatcgtccgacagattacctctgaccatgagcgccacaatattatcgtgctgggtggcgatggaacggtaaatgaagtgatcaacggcattgacggcctggcaaacgttacgctgggctatattccgatcggttcaagcaacgattttgctcggggcttaggacttcctgccgaccctttgaaggcgcttgaaaatatcctggcacccgtccgccatcttgcgatcaatataggcgtgctcgaatacggggataaaagacggcgcttttccgtaagcaccggacttggatttgacgcgggggtttgccatgaagttatggtatcccgtctgaaggtctttctaaacaagataaaattggggaaactttcttatgcaggagtcgcccttcaccgcatggcctcccttgatccgaaggatatgacggtaatcatggacggcacccggaaactggattgccataaagtatactttgccactgccatgaatctgggctatgaaggcggcggattcaaattctgccccaaagctgactgcgcggatgatcttctggatatcatcgtcatctcagacatgcccaagatcaaggcgcttgtgcttctccccactgcgtttaaggggtggcacgtattttttagaggcattcacatctataactgcaaagagattgaaatcatcagcgagaaagcgctgcccgtacacgcggacggagagcctatcttcctgcagaaacggataaaagcatgccttgagtcagaaaaattacgcattatcggtgctcccgaataaaaacaacggaggttactgtcatgatatggcttatcatcacgatcgcagtcatcctgctttatctatttgccctcgcgcccaggctctcccgccgtgatgccatgcgcgcctttttcggcaccatgttcgcccacaggggctatcactgcaaggagcgaggcataccggaaaattctatgaaggcgttttgcgccgccatcgccagaggatatggcatagaactggatcttcacctgacaaaagacggccgtcttgccgtcttccacgacgatacgctggaacgcatgtgtggaagaactgacacggtggaagaactgacttccctggaactgtcttcctgcactcttctagatacggatgaaacgatccccatgttcgaagatgttctcactcttgtaagaggccgggttcccttgctgatagaacttaagattccaaccgcctcccttcagatatgcgaagaagtcttaagacagatgcgaaactatcagggccccttcctgatccagtccttcaacaccatgggacttcgctggttcaagcttcatgccacggatctgttaagaggccagctttcatccaacctgaccgctaaaaagacccgggaatcctggttcttaaaattcatggtcaagtatctgcttgcaaacttccttggcaggcctgactttatatcttataaactggcagacctccctgtgatgaatgtctggatattgaagcatatcttccatacgccggttgctgtatggacgcttaagactcccgaggcgctttttgacgggaaaaagtgttatgatatccagatttttgaaaaatcctatgaaaattattaacaaataatgaacattattgttgattaccctttttcatgttataatccggggtgaaccataaatatattttaacaaggggcttaaaaggggaaatcactatgaaagccatagaaacaacgaaaaagatagtaaaacgctatagtcatgcatgggtgttcttatacgcattcatctatatgccatggtttctgtacctggagaggcgtaccggagtcgattattatatcatccactcaccgattgacaattatattcctttcgtagaatattttatagttccctatctattatggtttctgtttattgccgtaacggtaggctactttttctttacggacaaatggggtttctatcggctgtgcgcattcttattcacgggaatgacgcttttcctgctgatatgcacgttcttcccgaacgggctgaatcttcgtcctgttgtatttgaaagaaataatatttttgttgatctcgtcaaaaccctatacagtacggatacgccgaccaacgtgctgccaagcatacacgtattcaactccatcggcgtcagcatcgcgattgcccacagcaatgccttgaagaagcaccgcatggtacaatgcagcgcttacctgctggctatgctgattataatgtccaccgtattcttgaagcagcattccgtaacagacgttatcgctgccattgtgatggcatgcattatctatccgttcgtatacgtgacacaggaaaagaaagcgccaaagttatcacaccagccaatctaaccattctataagaggaggaaaccaattatgtatgcagaattcagtgaaaatcttatcacaggtaatgacatgatagattcccagcacaaggaactaatcgaaaaaatgaaccagcttctggaaagctgcgagaatggaaatgacaagttaaccgcagtaaagacgctggactatctcgaggactacacagattaccatttcaaggcagaagaacagctgcaaagagatatcgactatccgggctacgaaaagcatatcgcgcagcacgagatattcaagaacaccatcaaggatttagaagagatgctgcaggaagaagaaggcccatccaacgcgttcgttgaaaaggtagaagaaaacattgtaaaatggttctatacccatatcgagggcttcgaccgttccgttgctgaatataaattcatgcgcgagaacaatgagcgtctgtagatcccactgatacaaataaccggcctctgtgcagaggccggtttcttatattcctgcatcctttagtctttcttgattcctgcataacgggtatatttctcaaacgcggagggcatagaatatttcttctcgatttcttccggatgtatgaaaagaaaatctttctggttagtcttctccaactcatctaccattacttcatagccggtcatatgccattcgatatggctgaagatatgctttgccgtatccagtttctttacacggatgggcattaggccgatggatttgctatattcagttacttctttcatcgtcatgtggccaggctcgttcgggaattcatacagtcctgcaagaagtcccttagacggcctcttctgtatggcaagcctctgtccatccttgaatagaagcacggtccgcttctccatcttccgagctttccccttgctctttactggtatctcgcaggccgtcccctgcttcctcgcctcgcatagatgcgccactggacattcgccgcatttcggctcaccgttgggcacgcacacgatagctcccagttcgatcagcccctggttaaaatcgctggctccatccgccggaattaccttctccaatgcctcctccatcttcttgcgcacgctctgcttcatgatatcctcccggcttcccgtaagtctggataccactcggagcacattgccgtccaccgctggcttggggatgccaaaggcaaatgcgctgatagccccagccgtataattgccgattccttttaaagaacggatctcttcataagtatccggaaaacggccatgatagtctatcatgatctgctgggcggctttctgcatgtttcttacccggttatagtagccgaggccttcccatagtttcaggagcgtatcttcttctgcccttgcaagtgcctctaccgtcgggagttcccgcaagaatctctcataataagactttaccgcctccaccctggtctgctgaagcatgatctcagacacccacacccggtaggcgtccggattcctcctccacggaagatcccgcttatgattgcggtaccacgccataagaggctctgccatctcgttcaggattgggttctcaagcacgaccggcacctcttgggcgatctggatcgcgtcagggcttacctcgcagtcataggcaaccacgcggacgcctccttctgccgcttcccttaaggctttcgcgaacgccggatgggtatccgtattgggtgtaaagtagcggacatctctcatctggatgacaaaaaacacataggcttcataaccttgccttaccgcggctttcaactcttctacatgcttcacggcacgttcgcttggggcatcgggaaaacgcactcttccctcttcttccagcgtcacccccttgacctcgatcaatatcttccgttcattcgtctctacatacaggtctatcctggaattgccataagtatactctggctttaccaaagttgctcctttgatcaggccgcctttttcaatccattccttaaccacttggtttggcacctgggaatccatatttaccagcctgacgcttccctgatccgtctctttttccaccgcgatcagatcccatctggtcttccggtccggattgtcggactcctgcaggtagacccttgccccgggccttaaaagttcggcgcaccgtcccgtattctttacatggacggtttctttttttccgttgatatcgatatatgcgataaaccggtttggacgttccaggaatatccccggtatgatgctattgtatctcatctgtcttctcctttcactgcttcttgatgcgcccgcggcttcgtttgtcccattctatctgcttctcttaatgatgcctccagcgtatcttctactttgccctgccttccccagccagtaaaaaagccgctgtttctgccgccttttacaggttttatgcatttcgataccataaactgagtgcggaaaacgaactcctcggactccataatcgtaaatggatgctcctccgtcactatgatctgaacatctcccttccgatattctggatattttcccgagtatccctcgctttgaagacgagaatcaatgactctgcgtttcgtcttaatatcttcattctggctgcttccataatccctcttatcatatgcttccgacgcagcctttaacttatgccagatcaaaacatagagtttctcacgcttgtgcgaaaggagcctccggctcaggaaatgttcaatccttttagaaggatgcttgcggcaaatgcgcaacagccttgcataggaattatcacccgcttcctttgaaagagccatcatccgttctatcccctcataagtagccggatacctgtcctcaagagactcattgatcggagaccattcccggaaaggcgcgaattccatcagccttagcagttctttctctttcctgcttaaaaccttttcgcccggatactcatatttatcatagatcgttcctatcatgtacgccagctggcgccactgctcctgcccctttacccagaaatgtccaatctgatggtactgatagcaatggatgctttcctccatatcaaggcggccaaatgctttcggcagcccctctataccgccggaaaaatactgcctttcgctatcttcatgtatcatatatttaataataactccctcttcttacatatcagtatgttaagaacagactcattatattacatccctgtgttcttgccaacctgataacggcaaaaataagcagccaagaatcaagcggcatctccgctttcgcaaagatgccgccatgcctatatatgaaattcttcaaacagcagcattctatattccgtatcctccaacgcccgttccagttcttccaatcgctttgactggagtaactgctgggccagccgggccatacgcgcttccccagactgctcgccctgttttattccttgttttattccttgctcatgtcccgcattccaattacttttcatctgataattatagtccctgatcgctttctccctggcttcatactccagccgtttctgctcatccgcactaagattcgttaaagcctcataagcctttcccaggaatttatccgtctttgctatcatctccagttcctccttcctctctgcattgataaagcgtgcccacttcagcagttccgtctccggatatccatatttctctaatttgggcagttccagtatatgtacttctaatttgtccgtatacttcctgcgccttacatcctcccagatatggaaccttgaataaaactctacatcttcctcaaacattacgaagtccagtatgcctatatgtatacacttctttagtacgtcataatcttctcctgcttttatctggtcaacatacatctttcccaaataaaaaagcgaccgctccgcccacaattcaaaaggcgccatctgcatctccatgttgatctggacattgccattgagaagaacccgcacatcgaggatccccaatttttcttcttggctttccttcctcagatgagtgggaagcagcgtagtattaacaatatcctccggcctgattccaagcaccgctgagataaacccccgccgcacctccggctcctccatcaattccttaaagcaaaagtctactttgggcttcattataaattcactcatcttacagctcctttctccgtaagaaagatgcggcaaatgatgcttgtcctacttttattatatggacgtttcccggaatatacaacatctttcttactctgtatttggttgtcaattagggattattaaggctgaaaggccatgaaacttgccagatatggcttgatagaatccattttaatacataaggcttttgtttgcaatcacctttatctaatccacccatcaggccctcccatcaggccgtggtacgctgcttctcccagtgttgggacaacccctgcggatttaccattgctcctggctgcgatattcctgttgcagcgccgcttgccaatatcgacgcctacatggaagccgcgcgccaatgcgccaaatatccggtgcagccatccaactgggaggcctgattttcgcccggcaggcgaaaaacattgagtgcttacttacaatatgttatattaatgaggatgtctaactggcatcctcattcatattaaaagcaatgatgcaaaggagtatcacagcatgagcatattaaccgtagaccatctttcccacggattcggagaccgcgccatcttccaggatgtctccttccgcatgctaaaaggcgagcacattggcctggtcggcgcaaacggggaaggcaaatcaacatttttcaatattgtaaccggcaagcttgcccctgatgccggtaagatcgagtgggccaagaacgtccgcatcggctacctggaccagcataccgtgcttgagaagggtatgaccatccgcgatgtattaaaatccgctttttcctatctatttgaaatggaggcgaggatgaacgatatctgcgacaaacttgggtcggcagatgaagaggccatgaataagctgatggaagaattgggcgtcatccaggataccctgacgatgcatgacttctatgtgatcgacgcaaaggtggaagaagtggcgcgggccttagggcttctggatatcggccttgataaggacgtcaccgacttaagcggcggccagaggaccaggatcctgcttgggaagctgctgctccagaagcctgacatcctgcttttggacgagcctactaattatctggatgaagagcatatcaactggctaaaacgctatcttaacgagtatgagaacgccttcgtcctgatctcccatgatatcccgttcctcaatgatgtcgtcaacatcatctaccatatggagaaccaggaactgaaccggtatgtgggggattataatgaattccagaaagtgtatgaagtgaaaaaagcacagctggaggccgcttacaagcgccaacagcaggagatcagccagttaaaagacttcgtggcaaggaataaggcccgtgtctctaccaggaatatggccatgtcccgccagaaaaaactggataagatggatgtcatcgaactggcagccgacaggccaaagcccgaatttcacttccgcctgggacgcacgccgggaaaatatatctttgagatcaaggactttgtgatcggatatgacgagccgctctcaaagccactcaatctttcgcttgaaagaggacagaagattgcccttaccggcgccaatggaattggcaagaccacgttgatccgaagcatcctgggcctggtgcctcctctgtccggcacctgcgaattaggagagaacgtattgcccggctacttcgagcaggaaggggattataacaacaagacgacctgcattgaagaaatctggcaggagtttccttcctttaaccagtatgaagtccgctcctcccttgccaaatgcggcctgactaccaagcacatcgagagccaggtgcgggtactgagcggaggcgagcaggcgaaggtccgcctgtgcaaactgatcaaccgggataccaacgtcctgcttctggatgagcccaccaatcacctggatgcagacgctaaggatgccctgaaagaggctcttagggaataccggggaaccttgcttctcatctgccatgagcctgaattttatcaggacattgtaaatgaagtctgggactgtagcaaatggacgaccaagatcgtataggtcgtccatttggctatgttatattccctatccttccgtgatccctcttggcatctttccaatccttgcccctctcccgtacttcctggccgcatagataaatgcctccacatttgcctttggcgttcctatgggaagctggcagccggtattgagaataaagccggcaggattgtccgcgcattttatcagacattccctgcaggattccattacctcgtctatcgttccttctttcataacatccacaggaggaacattgcccgcaatccgcatccggtctcctaccgcatctttcgcctcttttagatcttcgcagttgtcaatgctgaaggaaaacaatcccgcatctgcaagatctccccatatcgggcttgtcttgccgcagatatgcgcgcctggcctggagcccatgatcttttccgttccgtcgatcaattttttgatgtatggcagggaatactcgtcaaactgcttcttactgatgacgtccatacaggtcacagggtctgaaaaattggtccctaccggtccaaattcccggcgaaatgcctcaaaccatctaagggagcattctaccgtaagatccagcagcttatgaagcatctcgggattcttgcgggtatccttaagcaccatctccaccggacggactgcgatcgccgtagagattggccctgccacgctggtggtcatgctgacatccgggaaccggtcttttagccgtttcgcgctttcaaggataggagccagcactggattcttgtatgggtccgtcacttccagcctctcaaagtccgcatagtccttaaggatatgctcctccacataatcgatcccatgttccggcgcccgcagttttgaccccagggctcctccgatcgtcttaagtcccaatcctacgttgaagctgtccaggccgaactcttcctttctccttcgtatgacttcgctctttacttcaaagtctttggcaaactgggtggtggtaaacccgaatatatctgccatagccggatccggcgcctgcaaggtataaggaatataatccacctcttcccccgcattatatgccttcatccgctccgctgccgtcatctcatccttctggccatccattagccgctttaactcatcatactccatcttctgatctcctttacctgtcccggccatgcacacagccggaagtgttcacgcttacggatattcaggaaaaatcatgctttcggtaaatatccgctcgtaattctcggtctccgccagttccatgtattccatccttctggccagttcctctacctcgtgccttgctttacttgacatcagcgtcatgtatgcccccgtcttggaagagtttcccacatagatcaacttatcttccacttcctttggcaggatcccggtccctgtcaatgattctgctggcagatgggccccaaactgcccggctatcagaaccttgtctaaatctttcatggaaattcctgctttattaagcagcgccacgaatcctgacaaaatggctccttttgccagctgtacctgccgtacatctccctgggttaccagaagccggggattctcatgcagaacaaattcccgctttgccccattcatctggatcatcagataccggtaatccgactcgggcagccgctccttcttgataaacgccccggtcttcttgacgattcctgtacgcagaagttctttcaccacggcgagtatgccactcccgcagattccggcgggttcctggttatctattgtcgcaagttcgattcctttctctgtgatccggacatcctcaaccgctccttcggccgcccgcataccggaactgatattcatcccttccagcgcaggtcctgcggcgcaggaacagcagagcagccttccatggcttgcaagcacgatctctccattggtaccgatatcaataaaaagtacatttcccggttctttctgcagctggcacacataggccccagccacgatgtccgcgccaatatatcccgatacctgtggaaggcagtaaagcctcgtatctttccctgcctggatgcctatctcgcttgctgccagttctctggcctccttaaatgccggtttgtacggcgctcttccgatggatctggcatccacgccgagaagcatatgcgtcatcgtacagtttgccgccacatgtatttcccggatttcttccttatccacggaagcctccaggcatacctctgtgatcattgcgttaatagactgtacgatcgcgtcttttaactctccgattcctgtctccggattctcatactcatacgtgatcctggtgagcacgtccaggccatagtgcttctgggcattgatcatggacgcgtccgccagttcctctccggtgcgaagttcgatcaaggccgtcacgacggtggtcgtgccaatatcgatcgcaatgccatatccatcctcataggcatccatcacgaactccggcacatatccttttgtcaataccttatgcttgcgttctttcttcagaagttctacctctacatctcccagcacttccgccatgcaggacaggcggataccctgttcccgttctcctgcgcttaactgatccatctccgtctcggaggctgcagatacctgcccgcttagaatccttaccttgcattttccgcagattcccttgccattgcaaggattatccacaaatatgccttcagcaagcagcaccttcagcagattatctccctccttgcaggaaatcttctttccactttgctttaccgtcactgacgccatcttacaagtcctccttcaggcacttaagaatcgcctggacattggcaagcggcgacttcattccaaggccgcaggccggagatatgatatccgatccgctttttacacagccttttgccagcgtcctcaccttctcctgctccccgaattccagagcgaacgtgctcacatttcccatcagcacccggtcctttaagttggcccttgcttctttcatgggaaccacagagtcaaaactgagcacgctgcttcgcaccatatttacttctttatatacgggactcatctgtccgcagatatgtacgatcgttcccatcttctcttcctgtagtccgtcaagcagctggttcagataggtaaccgcaaattcttcaaaatacttagggcccaggatctcgcctgtgccgcttgggtcggagatggctatcacatctgccccggcctcgatctgcgcccttccaaacgagatcagctgacgggtaataaagtccatatatgcatgggcctgcttattcttcttgcgcagttccttgtagaacaccaccggctccatcacggaactggctgtgctgattggcccggtcaggtttccgatgatcggaaccccatccgtctcttccctcaatatccggattgcgtccagaaccaccttggcccgtcctttgcctgtatctatccggggcagtttcccatagtcctccacagattctatggcataggcgctcacatgaggctcatagacgcgggaccccatctccaccttggctcccatctcctctgcctcaacggtcatgcagaacgggacgccataattctcaaaacagccagaatcatatacggccttggccagtcctgccatcatcctggcatctgtatgagcttccggcatatagatgtccaccgcatccatcagatccgtggtaaccatattcatcattccgccgggacagatgcagggcggccggtctactgcatttcctttcattacattgtacaatctttcctttggagtcagcatttttcttctcctttttctatgcaatattaagcaggcgtttggccagtttcacggcctccaccgcattctgcgaatagccgtccgcgccgatcttgtccgcatatttctgggaaatagggccgccgcctatcatgacctttaccttgtcgcgcattcctgcgtcttccagcatatgaatcaccgtctccataccgcccatcgtcgtcgtcattaaagtagacatgcagatcagatccgcctcttcttcttttgccgtctctataaactgctcaagcgggacatccctaccaagatcgatcatctcaaatccagcagtctccatcataatcttcaccagattcttgccaatatcatgggtatctccttccacgactccgatgattcctttgatcttcccttccccgctttcttccggaagataaggacgcaggatatccagtcccacatacatggcgtccgagcacagcaacacatccgtgacaaagtattcttcttcctcatacagctggcttgcccggttcatgccatccaccaggccttccatgattccgtcaaacgcaggataccctgcttccagatactctttggctgcctcttctacgtcatcttcttccatctcgaccacgccgtcggataatcttttcaataattcttcctttaaactcatactcacttctcctctaaatcaatctcaccgtcttgatcctgccgctctccaatttgtaatgtacatttttaatacacatctgccccatgaacctggcttttccaatcatctcgatgcagccttccccatattccatgggtccggataattctgcatctacgaattctgcctttccggttccaagcagggcaaatgtagtcttagggcataagagtatcagcggggaatcccccagcttctctgccgccttcttcagaaattcataagtaaaatcttccaccacctgctcggccatcttcgggcccaggatattcagtcctccagaggaatctgcataactgatcatatccacgccatacttcttagcttcctccatgaaccggagaatctctccgcctagtttccagaatacttccttcataagttccggcttcttgcgcattgccttgaacacgtactttgcatcgatcaatacgttcaggatcgtaaacgggccggacacctggagcaccacatgctctccctcttcgcgcagcgcctggcaggcaagaagcacttcatggattctcccttcctgtagattcatggctggaagttccagaagttcttcaggcgaggtgcagatatactctttcgctctgggtccggtcttctcgttcccgtaattgatgattccgcccatggcttccgcctccaccgtatggcagaatggaagttcgcagaatgaggcaccgtcatgccttttcagcgcttttgacagcgctgccatggtctcatggtgcatatatgcgtccggaaactgtaactctaattcccgggtcacctcttcattgatgcctgctgaattgtcatatgtacattgaaagtctttgatatctcccataattgcctcctcgttatccaaacagaaccttttccgcgtctttcgccgctcttaccactgccttcacattttcgtccggcgtcaggggcgatacatcgcagtcgccgcttaagataaaccggccgtcccttgcgccatccatacattcctgataagcaaaatcatagacttcctgctcgctgccctccataagcacggagcagcaggggatgttgcccatcagggccaccttgtcgccgtattcctctttcaccttcttggtctgcgtatcggagatatgccatgcatcgccggattccttaagtaccaggtcgaaccggtcatcatacagtccgcaagtatggatcacgatggatgcgccatagtccttaatcctcttgttggcacggatgttgctttgcgagatgcatttctcataagactttctggaaatgcagtatccgccaaaattaggcattgggaaccacaggaaatccaatcccgcatctaccagcatcttgcaggattccaccacggcatcttccacataatcgcacagggtacggaaaagttcctggttcttaatcatcgccttaaacgcaggcttcgcccccatcaatgtaaatgccaccgccgccggaacatggagtatggcatagatcggctcctccggctccgccgcccgcattagttcaatggtgcgcagtacatttttcatcatcatgcacttgctcggatcatacggctttaacttttctatatcttcaaaagaatgtattacgtcatccccgtcccccacaatctttccttcactattcggaagatggcctcccatcatggcggcgataccgccatatgcgcctgcgcacaggccgtcatagcccagtgcctgcctggtcccgaccatgcattccgtcagtttttcgggactcatcatagcctccggcattgtatatccataccgcatcaccggcaaggaaaatgcattcatgatgatggggattctatccgcccctgttccatccagtattgcctttaccgcttctctttttcccatcatggcttttttcctcctatgcctcaaccaggttctttgcaaattctaccgcctctatggcactgctggtatagccgtctgctccgatttttttggcaaatgcaggagataccggcgctcctcctaccataatctttaccttgtcgcgaagtccgaattctttcagcttgtcaatcacgatccccattcccggcattgttgtcgtcatgagggaggacatgcacaggatgtccacctcattgtcccttacataatccacaaacgcgtcaagaggcacatcgcggcccagatcatggacttcgaagccgcccgtctccatcataatctttaccaggttcttcccaatatcatgcgtatcgccttccacgactccgattgcgatcttgccgatgctggtattcgcggcttccggaagatatttttgaaattcttcgattcccgcatacattgcatcagaacaaacgatgagttccgggacaaaatattctccttcttcatacagctcgctggccctcttcatcccgtctaccaggccaccaagcatcccttcctggggatcatagccgcatgcgatatactcctttacgacatccactacctcttcatcttccatctcaaacacacagtctgacatttttttcatcaatatctctttcgtctccattttctcgttcctccttaattatatattttttcttcgaaacagcatttctaacgccgcctgattcaagccgcatccgatcaccaccgcttcgccgccagttcccgccggattcttttcttccctgtatttggataccgacggtgtaaaatcaaaatgaaccaggcctttttccatagtctctatccagcctttggctctcaggatatatccatactcttctttttccaaggccttcattatggcctccaaatcctctatacgcatttgcggcagatccataaaggagacgctggaaaataccttgtctgccggaagtgccgcaaatgctgcatccctcctggcatcctcatcataatcaggcgcctcttccagaagttttaagagttcttcgttctccagctgcctccagtccccatcatataagatagcgtccggattcagttcctttaagcgtccgataatgatttccttctgtgccttattttctgcttccacatggcttaatagcagaaggcctgctctctctatctgatcttggtagaatgctccaaatccttcgatatattcctcaaaggaagccatgtctacgattgcaatcagttttgtaatctgcaggctgactttctctctttcccttgccatctggcaggccttgacaatatccgttagccgccctactccggaaggctctatgagaattctgtccggatggaaattctcggcaatctccttgatccccttcctgaaatccatggccaggctgcagcagatacatcctgcaaagatttcacgcactggaatgtcttcctgtattcgatccccgtcaatcccgatatccccaaattcattctctatcactaccgtctttccggaaagcagtggaagatatctatttagaaacgtcgttttcccggctcccagaaagcctgtgacaatctgtatctccatatcgtccctcctatgtaataaaaaacggcagggaaaaggcagcgtaaatactgccctttccccaccgaaaagaatcttctatatatagcaggtctcctgactcgatctcatcctcaagtcccgccttccccggctgaccgggtggcttatgggacgatcgtccatcacacagtagagcgggctgtcctggattcgcaccagattcccttttcaatgccttcgcatcactatatacgttactgttattatgatatcatagaaaaaatcgtcatcctaattgataatcctgatgagtctatagagatcatctataatttgcaagttcttctgcccatgctatgttttcaataagtgcccgaagctggattcgggaagaatacccctctgtcagttcgtcaatcttggcattgaccgccggatgaaaggatctcccttgtatcttctgctcttgtccatactggaatgcctgacttaagatttccttgtctgtaatccgttcttccgttttgatgcttctcaggaaaagaatgttcttagacggagcctcttccctccagcggccgctaatcttgaccctttctccctcaaacatatatccgtcgcaaacgtccgaatgatatccaaggattgtgatccctgcttcttccatggcctttatggtccctcccaggtcaaacatatccttcggcgatactgcaagcaaggatacggggctattggccagcgccttaagatcatggcattcctctggcctctgcccctccataaggccgcccatgccgcaggtgacggccagcgggattcccaatccttcgcacgccttcatcgttcccgatgcggtaagcgcgcctgactttccattggatgcatagtactcataattctggtaatttacccggtcaaagtcctgcgcctttttcctgaatcggcagaaatcttcgattcctccaactcttaatccgccatcttccatccacgcaatacttgtgctgtcctgcggccacatccgtatcagttcatcctccgtgatacttctaaggccatgcgtaagaagcgcggactccgcgagatagcctaccataaagcctcaatcccttctgcctgagccgtaagatccatatggttttctttctcgataatcccaaggtatccttccggtatgctgtctgcgccgttgcatgctccggcaattgcaccgacgatgcaggcgatcgcgctggtctcatcgccaatatttacagcgtcatagatgctctccatcgtatctccctgattggctatcaggattcccaatgccgcaggcaccgtctcagagatggccgggccgctcccaatccgctctgccaattcttttactacatctttcgtactgccgcagtgaagggcgatttcaaccgccatctcaattctcttcgtaacggacggaccgggatatacccagatatcctcccttgaccttgccagttcttctccttttacactgccataatgtgctgcttttataatctgatatacggacgtgtcatcgcgcattgcctcgctgaccgccgcggcaaccgcgcacgccccggatatgctgtaagggtcgtcgtgggatgacatcgtgatctccaccgtatctgcgattgcctgatccatatttccattgctgatgagtccttcgggataagccttgcttgccgcgccattggaggaaagcgcgtaataatgtcctttgtacagtttatttcccagatgtcccgcataggcccacgcgctcatgcttgcatcctttttcaggcggtttactgcattcctggtagtcatgcctgcaaatggcccaaaatattcggtctcgccccactctagcaaagcacgctctcccagctccctggtggcttttcctccttcttttatcaaatgtttcgtaagtatatagggaatgctgaatgcatccgtgacttgtcctgctcttcttcctctggccagcgtatcctgtggaggcgttttgaattcccgcacggccccgccaaatgtcttctctatctgcctggtggattttgtctccgtagcggctcccatagcatcgcctaccgctgcccccagcagacagcccagcaccttcttattcatgccttgcacctcctttctcctgcgcccgcagcctgtcctgcgcgatcgcagtcagatcttttgccagcctttctatttccaaatgatttgcttcctgaagcgttgggaggaagtgcggcggaaatgcgccagcgccatttaaagcaccggagagcgctccggacatggtcgcgatggtatccgtatcatatccgacattgactgcgcctacgatagagcccagcgcatctccttcatttgctgcaaacagcccgaacgcgctgggaatcgcctcagagacatgaagtcccgcgccgattcgatgaccgatctccaccatcttctcccaaggcgttcctcttcccaggccgatatcaatggccatctccatccgcttgaccacggaaggccccgccacatccctggccacttcccggccaatgcgttcgccttccctggctccataaagtccggcctgaagcacgctgtatacatccacatccggcataactgcccggcttaccgctgctgtaaccgcacatgctccggatatcgcaagatagttgtcatgggtcaccatcgtcacagtcaccgcgtctgctatggcctgctcgatgtttcccgcattcagaaggccgatcggcgatatcttcatagccgcgccattggtagcctgcctcgtaaccagttccacgcctcctgacttctcgaccttctctcctttgtatctgcgtatggcaagcctggtggtgggcccggcgaatcggtcaaaaaataccgcatgctcggaccagtcgatcagcgcttcctgtacgacttcctttgtcacctctccgtgattatccgcaatatgccttgctacgaaatacgccgaactaaaatcatctgtaagctgtcccggcacgttccccgcgccgaaggtatccataggcggagtctcaaagtccgtgacttcatgcccgaaatacgcaagtatctgttccgtcgtcctggcctctgtcgcggcccccatggcgtcgcctgcgcctgcgccgatcagcccgccaagtattctgtcatacatctgtctgcttcctccttctcatcattgtctgttatctgcccatatgaaaggggaaatgtcccttgagacatctccccatcctgccctaactcttttggcatgcaattctgaactaatgccagtctgacatctgatccacattggtagaatctacgactgccatcggcgtgctgtctcctaccttggacacatcctgtccctctaaagccttcagcatgatgatgactgcctctttccccatcagatatggtgacattgcaacggtagcgtcataggttccctcttcgattgctgcttttgcctcctctgtaaaatcaactccgactaccgctacctggtcttttacatctttttcttctaatgcccttacaactccaagcgccatatcgtcattgccgcatgcaattcctacgatgtctggattcgactcgatgattgcggctgccgcgtcatatgccttctgggcatcaaagtcacactgctcgaccgctacaacttccatgccggcgtcttcaaaagtttcttttgcaccatccctgcgggcatcagactgtgttgcgccttcgtttcccgcgattactgcaaccttgcctttgccatccgtcttatcaatgatatactgagcgcccagaactccctgattgtagaagtctacggtgattttcgcatcaatcttgccgcctgcttcttttaaggaatcttcattcacttcatttcctgtcgtaataatctttacatcattctggtttgccgcaacaatgcctgaaatcaggcaatcttctgtaagcggggataccgcgatcgcttcatagtctttcacaagcatgttattgagaatgtcgagctggcctgtggtatccgtatctgaatctgtagcctgcacatcaattgacactccatactcttctgccgtatcctcatacccttcctgcatcgttacccagaaagaattggtaagcgtgctctcgattgcggcaagcttcttccctgtgtctttctcaggaagcggcgcaagatcttcatttacctgcgcaagcgccttgccaaatactgtgtctgttgagacttcctttgttccttcatcctttttctcttccgtcttctttgagtcttccttgctgctgtcttttgaatcgccggaaccagaaccgcatcctgccgccaatgttgccaccatagccacgcaaagaagcaggctgactaatttccttttcatgatcttttcctcctcgtcatgttgtttataagtatatcgttaaagagtactgctgccagactccttaaactccagcacagctgccacatccgcacggcttctgggcccctcctgcatgcatttgatcgctgcggatgcatttgcaaattcaagcgcttccttcttctccatgccctcctgaaaatatgcatacagcaggccgccaaggaagcagtctccggctcctgtcgtatccaccggatcaatcttatgcgccgggaccctgtattcctttccgtcataccacgcggctccttcatcgccagccgtgcagatcacgccttcttttacctgatacttttcccataccatcttcatggccttaaggtagtcctgctcgccggtaatttcataatacccgtccctgccgcttacaaataccgtgcacagccgcatcatttcttcgatatcttccctggatgtaccgcacatttccataaacgagggaacgcactgcatgttgtagagaaccggcttcccctgttccacagccttctttgccagccagagcgctgcctttggcgaaaacatgtcattatagaaaatatccatggagtccataatctcttccggcagttcttccggtatcagcgtgcagaccgtatccccggtattcgcaaaaatacagtgcttgccccccggcgcagtcaatatataggtgtgaagggttgtcccaccctttttcactgctacaagttcagcgtccactccgtcttctttcagcgtcctgataaattcatcgccgatattatcatcgccaatcttgcctgtctgataagactccatgccaaagtgcgccgctgacacggatacattggaagcgctcccgcccgggagcatctgctcctgattgatcagggcaaatccatcgtcctttggaagatcatggctgttgattacgatatccatggcaattgcccccagagacaacaatttctttcccataactatacctcgcttttccttctttgattactttccgatatgagaaccgatatcagcagaatcaggcccgtcaggatttcctggtaatgcgtggatatggacagcaaggtcaggccgttcttcataatattcagtataaagcaggcgatgaccgtgcctataatgctgccttttcctccctgcatgctggttccgccaagaatcgtagcggcgatggcatccatctcatacccctgtcctgccagcggctccgccgaattcagcctcgctgtcacgatcatgcccgcaatcccggcacacaggccgcagaaggtaaataccatgaccttgtacttccttacattgacgccggaacggttcagcgcaatctcattggaaccgataaacaggcagtagttgccgaatctggtcttatgtaataggattgctcctatgaccgctatcatgatggatatgaggatcggcatgttcgcagggccgacctttccgcttccgataaatccgaattcaggcccgaatccaaagactgactttgaattcgtcaataccaatataatgcctcttattatggtcatcgtacttaaggtcactataaaggaattaatcctcccataggccacaatccatccattcaccaatccgataaaagcggcaatcgcaagccccagcagtatcgccgccgaggccgggaggccggccttgatcagcattcccatgctcatcccggaaaatccgatgaccgcgcccacggacaggtcgatctgccccgcgcagataaccagtgtcattccgacagacagcaccagatatatggccgactggttcaatatattccgacagtttttccatgaaaagaagtagggcgacgctgccgccagcacgccgaccagcacggccagcacgatcactagtatgactgtatatgaatagtttttcagattcttcttcacgatgcttgctccccccgctacgatgccgtggatgctcctgtgatcatagccaccacttcatccatcgtcgtatcttctgtccttaattccccaatgactttcccctggcgcatcacgcatatccggtctgatatgtggaatacctggggaagattatggcttatgataatcaccgcatacccctgggcagcaagcttcttaatcagccttagcactgcgttcgattcattcagtcccattgccgccgtaggctcgtcgaagatcaggatcttcccgccccggtggaccagtctcgcaactgccacgccctggcgctgcccgccgcttagattgcctaccggaaccgtcacgtccgggatatggatatccagatcctcaagcagtctcctcgcctcttcattcataaccttcttctgtaggaaaccgcctctggtcctctcatttccaagaaacaggtttgcggccacatccatcgtattgccaagagccagatcctgataaacggtagagatcccggacgcggacgccttccttggagtgagcctttcgtattccttcccttccagcctgatgatgccgcagtccggcttcagcactccggagaggatctttatcagcgtagattttcccgctccattatcccctacgatcgccagaacctctcctccataggccttcattgatactccctttaacgcctggacatgattaaaactcttatggatatcttccgtttcaagaaagggggcttcgctaaccaattccatattcattgtaatttctctccattaatatatgaaataaactttaataatagatatttttaatacataatcatgttagcaccggcatatctataagtaaaattgattgtttcaataactttataaatgttatctataattaacttcctgagcaactaccaaaaacagacgattcttaccctattttttatatcgcataaaaacgctctataaatccatgccagatatcacaaaaagcaattggaaattttcatcgaacttgactatacttaagtcatacaaataatcaggaggtaagaaataatgtctattacagcagaaactgcaaaagaacatgcaaatgacccggctgtattatgctgccgggcagaagagggcattacaatacaggcttccaacttggaagatcctgctatttttgacgagttagtggattcagggctgctatctttggatggctgtctgacaatcggacaagtcttaggggcaaccctgacaaagacaagcgattctttatgtccattgactgcagataacgtagggggcttcaaagaggtagttgaggaagaagagcctgcatcagagccagtcgaagaagcggtagccgcagatattaatattgggggcgcggtcaccacgatcaaaaatggaaaagttgttatttcaatcaaagaaggaaaagatatctatttagaacttcctgtttaattgactctttctcctttcattacagaaagagggtatattataaataaccggcaatatccggcagctgctacatccaaatgattcatttggattgccggatagacgccttctatgccggttaaaaagttcctttcttgaatccttaaggttttgcaaaaaaagcaccggacgcgcgtccggtgctttttcgttactttataatactcttctacaatatcttggacaggaactcctgaagcctcggatccttcggatttccaaagaattcttccggggttccctgctctttgatctggccttcatccatgaagatcactctggtagcgacttccttggcaaatcccatctcatgcgtgacgaccaccatggtcatcccgtctctggcaagcttcttcatcaattccaatacttcaccgaccatctccggatccagcgctgaggtaggctcgtcaaaaagcattacatccggatccatagccaatgagcgaataatggcaatacgctgcttctggccgcctgagagctgggatggataagcgttcgccttctcctcaagccctaccagctccagtagttccattccccgcttctcagcctcttccttgctctttcctaagagtttaatcggagccagggtaatattctgaagaatcgtcttatggggaaacagattgaaatgctggaataccatgcccatcttctgacggtgcttgttgatatccacattcttatccgtaatatcggttccttcaaagtatacatgtcctctggaaggcatctccagcagattcagggaacgcaggaaggtggatttgccagagcctgaaggcccgacgattaccactacctcgcctttcctgatctcctcggagactccgttaagcgcatgcagttccccgaatatcttatgaagttcttctactttgatcaatacatctccgttattagtggtcactgctcctcaacctcctttccagcatatttacaagttttgtaaatataagcaccatggcaaggtagatcagcgcaaccgcaatcagaggcataaaagcatcatatgtacggcttctgataatgtcgccgcccttggtaagatcctgcaaggcaatgtatccggacacggaagtctcctttaagagaacgatgaactcatttccgagagccggcagcacatttttaaatgcctgaggcataatgatgtatatcatcgtctgcacatagttgaatccaaggcttcgtcctgcctcgaactgtccgttgtcaacggacatgatcccggagcggaatatctccgctacatacgcgccggaattaaggccaaatgccatcactgccaccaggactttgctgacatcagaactgccgaatataacgaagtagatgatcagcagctgtacgactacaggagttccgcggataaccgtcaggtacagtttgcagatggcattcagaatgcgaagttttcccgtcttatcataggtagagcgcacgatggctaccaggaatcccagcacgataccgatgataaccgcaaagaatgttacccgaagagtgactcccaggccttctgcgatgtatttccagcgttcatccgctataaaattgttataaaacttatcctgtaatgttgtaaacatactctacatccttatcctatgaattattctgccttgtcagcagaaatgtattttgcaacaatctcgtcgatcttgccggattctttcaggctggcaagcgcttcgttcatcttcttaagcaggtcgtcgttgtcttttgcaactgcgatcgcatactcttcttctgtaaatgcctcatccagaatcttaaggccatctgcctctgcaacgaactctttcgcaggctccccgtcgatcacgactgcgtcgatcttatcctgcgtcaatgcctgtactgcctcgaatcctttattgtaacgctcaacttctgcatcctcgatgtcatctgcatagatgtcgcctgtcgtgccaagctgaacaccgatcttcttgccggtcagatcatctggccctgcgatatcgctgccttctttaacgatgattacctgtgtcgcggttgcgtatgtatctgtaaaatcaacattcttcttgcggtcttctgtcacagtcattcctgctgcgccaaagtctgcctttccgcttgtaacagccgggataatagaatcaaacgccatatcctcgatctttacttccattcccatctcttccccgattgctcttgcaatatccgcatcgatgccgactacatcgtcgccttcgtggaactcatatggcgggaactctgcatttgtcgccataacaagcgtgtccttggaatctttcttagagtctccggaatccttagaatcatcctttgatccgcatgctgccaaagagaacacgcatgctgcaactaataatacgctgactaactttttcagtttcataacttctttcctccagtatatttaatttactatttggcgcactgtgcctatgaatgcataaaaattcaagcctagtacatattctatcatgtttttcacaaaaaacaagtatttttctttatattttatgcaagaaacgtctgtaccaatgtgaccactatgattattcctcccagaataatcctgtagtagccgaatattttaaagtcatgcttcttgatatagcccatcaggaatttgatcgctacgacagacaagccaaaagataccaggcatcccagtatcagcaggccaaattccgcccctgtaaaatggaatccaaacttcaccagtttcagaagacttgcgccgaacatggccggaattgccaggaagaaggtaaactctgccgccacttcccttgacacgccgataatcagagcgcctacgatcgtcgcccctgatctggacgtacccggaatcagcgccagcatctggaatatgccgatccagatcagcatggaaacggacagttcggatatcctccttacagacggctttcttcccacgttacggttttctactattataaacaacacgccatagacgatcagcataactgccactggaaacggcttataaaacaacttatccaggatgtcgttaaacagaaggcctacgattccggccggaacggacgcgatcagcaccttgatccacatctgccaggtcagcatcttctgcttgctggtctttctcggcgagaatggattcagcttgtggaaatacagaaccacaaccgccattatggctcccagctggatcaccacgttgaacatctccatgaacgcatcgctcatgcttggcttaagcacgtctcccaccaggatcagatgcccggtgctgctgactggcagccattccgtaattccctcaacgattccaagaatgattacttttaatacatctaacatatctctctccttttcttattccagcacatattcctctatgaatctggcaaccccttcctcgtcattggatcgcgccacatagtctgctgcttcttttacctcttctgttccgttttccatagctactccggttcctgccttctgcatcatgtaataatcattggatccgtccccgaaagccagaatatcttcccttctgatgccaagtcttttccccagatcaatcaatgcatcccctttattcacgccctgcgcattaacctcgatattcttatccagggcgcctgtaaccacaatgcctggaatactttttagttcttctgccgccgcatcccggtcttccaaggttgcgaacagtccctgcatcttatccaccgcccggtcctctgcctcgaacttggcacgtacatccggcaccggccttcgggtcgtcacaatatagttagccataggcggagactctatatagcgctcgacattcttaagcgcctcttcctgggcgtagccgattccatcatagtatatctcccgaagcgtatcataatgttcgaagatttccaggacctttctggcgattggcgcggaaaccagtttttcatatatggttctgccggtccgggattctaccactcttcctccgttggctgtaatggcatagcgtatgcccggaaaatggagcagttcgcctggtatgccgctcagaggcctcccggtagccggaagaactacgattccctgggcaattgcttttcttaggatttcctttgtataaggggtaaattctttttcggtggttagcagcgttccatccagatccagcccgatcattctggccttaatcttcatatgccgttaattcctttctgtcttttgaaaaccgtattaatgtcttgctgaccttatccttactctgctcataagcatttcccccatgctccaccatcttctctaccaccgtcttctggcttgccggggcaaataatatggtatccttagctggcaccatgataaccaggtcatcttttaacttatctacgcacacctgccagatatgcttaaagcacagcgcgctggcttcatgatggccatccgctataatgccgaatcccccataccaggtatttgcgatcacgaattccacatcccggatcagattctcgcaggaagcgtgatagagttcctcaatatcgcaatccggaggcagcatattatccttgaggacttcaaatacatcttcccccctcttgattacaaatataaccgacaggtcttccataaatgataccaccagcgtatctttttccgagatatgcttcccattcagcgcctggctgtcggtcagctcgcttttgacccaaggatagatcttttccttgatgttttcatatttataatgctcttcttcgtattttctcatcgtcttttcctctcaatcatacattctatgttctattctaacaaaatttgctttataaagcaatttgttgtataatagataagcactcgctagaaaaggaaaggatgtgtatatgataagtacaaaaaagaaacgtatattacggtcagccctggcgctggttctaaccaccgtaacaatagcttctgtgaatacttcggtatattcggcaccttccgcagaagaactggaagatactacctccggcctgcagggtgaattggatgatttgaacagtcaattatcgtccttaagcgctgaactggactcagcctcttcaaaaattgaagatttatccgctgatgtagaaaaagccaagcttgacctggcggcagctcagcttaatgaggatgcacagtatgatgccatgaaggacaggattaagttcatgtatgagggcggcagcgcctccttgattcagatcttattctcttctcaaaatatggccgattttcttaacaaagcagaatatgtaacaacgataagcgaatatgacagatccatgctggacgagttgcgcgatgtgcgtatcagcgtcgaagaaaagcagtcggatctggagagcaagcagcaagaacttgcttcattgcaggaaaacctggaggcaaagaagaatgaactgaattccaagatctcatctacctccggacagttggatgattataaatcacagctggaacgcgcaaaggccgccgaggaagccagcaaagtggcacagaacaatgatatttccggctccattacgcctcctgccaataatggtaacagtaacaacagcagcaattcgaattccaactctggtcagatagacgctaacaccagtgatgttgctttatttgctgctcttcttgagtgcgaatccggcagttacgacggcatgcttgccgttgcaacggttattatgaacagggttgcaagccccagttatcccaattcgatacgcggcgtaatctatcagccgggccagttcggcccaacctggaatggcagtctgaacagagttctggcaagagggccttcctcaacagcctattctgtcgcccaggcggctttaggcggcgcacgacactctgccgtcatcaattgctattcttttaatggcgcggcatggactgatgtaccgggagtcgtgatcggtggaaatgttttttattagaattttcatggacatattatgaaggattaaatcaaagggcattactatagtgaaatagtaatgccctttttgtctattgataatccatcacatcaatccatttcatcaggaaatctttctccagctcattgtctttctccaattgcgaagctgctacgatcggaagccactgctgcacgtactgtctggcggtgtcgctcttcttgcagaataggttcaggtacagatctgccgcttcctgatccttaagcgcgaacagaagatatgtcattgccgcatcagcgcttgcatttccctgggtggcatgtgcccagtcaacaaccgtcatcttcccgttctttcctacgatcacattgctgggattgaaatctccgtgacatagcttcgtatgctttggcatgctttccaaccgggtcagaagttcatatctctgagtagcatccagttctttcaagccgttgatctgccttgcaagcttatccttcaacttgttcagcagtggcgctttcttctcatgtaccttcaactgcagatccacgaaatcagacatgtatttctccagattgtcatggtcgactttcatcatctcttccagcgtcttgccatccttgtattcgatgaccagcgaccacttcctgtcgatctgggtcacttcttttaactttggtatatctaagccagtctcttctacccttaccgtattcaaagcctcgttaaagactgctgacttcggatggaaggtctcaaatactttgacaatgctattatcgcatttataaacctctttgtaaggacgttttaatatcagattaccttgctccagtttcataagccatacctccttgtagtatttgccgttcatttttttgatggcttaattatacaccagcaggaagcatttgaaaagagttatttgatatttttttaacttatttttttattatatttttattgttatatatttaacatatccggcaaattacgtacaaaaaggggcgggttctgcacgggatatgagccttccgatcgggcagaacgccggatatattaatggattggaaaacagtaagggaattctttaatgtagttatcaagacgcagcaagagcgcagcgaactgctgcgctcttgctctttgattcttattttccgtagtagcatttcaggtagatttccttgatctctttcatcagaggatatcttgggttggcgcctgtacactgatcgttgaaggcctgctcaaccatgtcatccaatgtatcaaggaagtacttctcgtctacgccgtagtctttgatcgtcttcttgattccaatcgtatcttttaattcttccagtttcttacagaagttatcgaatacttcctggtcatcctttccctggcatcctgcgaatcgtcctagttctgcatatctggcctgcgcatgcggatactggtactgagagaatgttcccatcttggttggaacttccgctgcgttgtatttcattacctctgttagaattactgcgtttgcaacgccgtgtggcagatgatggaatgcgccaagcttatgggccatagagtggttcagtcccaggaatgcgttggcaaatgccataccagccatgcaggaagcattggccatcttctctcttgcctcagggtcattggctccattttcatatgcagatggcaagtagtcgaatactgcctttaccgccttcattgcaagtccgtctgtatagtcggttgccatgatagatacatatgcctcgatggcatgtgtcatgacatcgataccggatgcgctggtcagtccttttggctgggtcatcatgttatctacgtctacaattgccatgtttggaagcagctcgtagtcagcgatcggccattttacccctgtctctgcgtctgtaataattgcaaatggcgtaacttcggaacctgttcctgaagatgtagggattgccacgaagtatgccttctcgcccatcttcgggaaggtatatactctctttcggatatccatgaagtccatagccatatcttcgaagtttgcttccggatgctcatacatcagccacataatcttggcagcatccattgcggagcctccgccaagtgctatgatggtgtctggctcgaaagccctcatctggtcagtacccttctgggcgcactgtaatgtcgggtctggagcaacctcatagaagcatgtatgctggattcccatttcatccagtttttcttcaattggagcaacatagccattcttatataagaaggaatccgttacgatgaatgctttcttcttattcataactgttccaagttcatcaagcgcaacaggcatacagcctttcttaaagtataccttctcaggtgttctaaaccacagcatgttttctctcctctcagcaaccgtcttaatattgattaagtgttttactcctacgttctctgatacggagtttcctccccaggaaccgcaaccaagggtaagagatggagccaacttgaagttatacaggtcgccgataccgccctgggaagatggcgtattgattaagatacggcaggtcttcattgcttcggcatgttttgcgatcttctccttctgcgccggatgtacatacagagaagccgtatgtccgtatccgccgtccgcaaccagctgctctgcttttgcaagcgcctcatcgaaagtctttgccctgtacattccaagtaccggagacagtttctcatgtgcaaactcttcggatatgtcaacagattctacctctccgatcaggatcttcgtatcttccggaacgttaacgcctgccatcttcgcaatctcatatgcggatttaccaggaatcttgctgttcagagcgccattgatgatgatggtcttgcgtaccttatctaattcttcgcctttcttaaggaaatagcatccgcggtatgcaaattctttctttacttcatcgtatatgctgtcgaggacggttactgactgctcggaggcgcagatcataccgttgtcaaatgtcttggagtggatgatggaacttactgccatcttaatatctgccgtgtcatcaataataacaggagtatttccaggtcctacgccgagtgccggctttcctgcggaatatgctgacttaaccattccaggaccgcctgtggcaagcgtgatatctgcatctttcattactgtatttgtaagttccagggatggaacatcaatccagccaatgattccttccggagcgcctgcctttacagcagcgtccagcacgatcttggctgcggcaatcgtacatgcctttgcagctgggtgcgggcttatgatgattgcatttcttgtcttcagacaaatcaaagtcttaaatattgctgttgatgtagggttggtcgtagggatgaccgctgccaccagtccgattggctctgcaatcttcttaattccatatgcagcatcttcttccagcacgccgcatgtctttgtgttcttgtatgcattgtagatatactcagccgcatagtggttcttgatcaccttatcttccacaattccgcgtccggtctcttccactgcctgctttgcaagcggaatacgcatcttgtttgctgccatcgctgcctcgtagaagatcttgtctacctgctcctgattgtatgtagcaaatactttctgagcctccctcatcgccttcattttggcttcgagggcctctacgttgtcaatgatttctggtactacttccttcttcttagccatcttgattatcctccctgtgaatgtgtattcttcattacagctcatagtatacgaaattgttaattatttgtcaataggtaattgatatttttttaacaattatttcaagttcacatattctccaccaaaaaagcggctcacatgcggccaatgtcctttctatctgacatcagccacatgggccgcgctttctatcgctggattctattcttttctatgctcagtatgcagcagcatgtgcgccttatgggaatttggcttctcaagatattcatcatatattcggatgatgtcccgattctcatgggagaaccgaacattcgcgcctgcatccagcatatacagattctttcctctgtcgtatgccctctcttctccatcgtggatcggctgcccgccgccgccaacacagcctcccggacatgccatgacttccacgaagtcataatggacttcttcccgctcgatccgcttcagcaaaactctggtatttgccaggccgcttaccacggcggtcttcactgtaatatcatctatcgtgaaatcagcctctaccacgccgttattctcctggaatccaggacttctgacaacccggaacgcatctacatccggattctcgctcttaagcaggtagtatgcggagcgaagagccgcttccattacgccgcccgtagcgccgaagatcacgcctgcgcctgagccttcccgcataggcgtgtcgcttttaatatcttccagcgtatccggacttatatgggcagaacggatcattttgatcaattccctggtagtgatcaccgcgtcaacgtcatggcccgcgtattcgccgtagaacaattccatctcccgctcatccttcttggctacgcaaggcatgacagagactgtatagatctgttccggggatacgcctattttttctgcaaaataggtcttcataatggcgccaaacatctgctgaggggattttgccgttgacagatacttcaccatatgcgggaactgggactttacgaagcgtacccagcccggacagcaggaggtgaacatgggacgatccttcagttcgcctgatgtaaaccgcttcaagaactctgttgcctcttccataatcgtcagatccgcggaaaatgccgtatcaaatgcatagtctactcccattctcttgagcgcgtccagaatctttcctaccgttgcttcttccggatcaaggttcaatccttcgctccaggcagtccgcaccgcaggggctacctgtgcgatcacgatcttatccggattggcgatggcattccataccttctccgtatcgtcccttgcacgaagcgcgcctaccgggcaatgggtaatgcactggccgcacagagagcagtccgcctcctcgatgcatctgtggccgcctacgttgatggtcgtccttgaccctgtgccttccacatcccatacgctaagtccctgtatcttatcacatacctgtacgcagcgcatgcatttgatacatttggaagaatcgcgaatcagaggaaagttcttattccatggctgtctctcgatctcggatttatacggattatcaaatatgttcaagtcgttggcaaccttctgcaggctgcagttgccgcttcttgggcaggtcacgcattcacagtcatgctgtgaaagtatcatttctaccgttgttcttctgtggcggcgcaccttcgggctgttagtatggatcaccattccatcttttgccacattgttgcaggaagtaatcagacgatcctttccttccagctccaccacgcatacccggcaggccgcaatctcgttgatgcccttcaggtagcacagttttgggatcggtattccatttgccgcggcagcctccataatggtggtattctcttctacagatatcgcttttccatcaattgtaagatttaccataatgtctctctgcctcccttaaatatgccatagccaaaatggtcgcaccgcaggcagcgggatgcttcctgctttgcttccttctcggtcatgcagttctctacgccctcaaagtcgcatacccgctcgcaggcctcacgttctgtaaggttaaccctgccacaaggagtacggtcctccagatgggcttcagggatctctacatcacaggaaatctcatgatggtaacccagatactcatcgatgttggctgctaccaccttcgcagccgcgatcgccttgattacggatgccggcccgcttgcgcagtctcctccggcaaatacccctggcatattctcgaacgctcccgaactcttcgtgacaatcttgccccgctctaccggaattcccgattcctcaaaatggcgggtctcgatattctgtccaatcgcaacgatcagcacgtcgcacgggatatagacatcctcctcgccagtaggcttaatgcttgcccttccgtcgcggatcgcgctgaccatctgcggcgttacatagatgccttttacatggccttcttcattcacatcaatggctgccggtgcctttagcgtctgtaattcaatgccttctgccacggcaccgtctatttccccaggaagagccgtcatatcggcaacccttctacgatagacgatgcttaccttcttggctcccagccgctttgcagtacggactgcatccatggatacgttgccgcccccgatgaccgcaacctccttgccggataagtccataatctcattctttcctacattcctgaggaactggaccgctgacagcactccatcggcatcttccccttccagccccaatttcttgtccgtgctggcgccgatggtgatcagtactgcgtcatactgcttgcgcagttcctggatggtgatatcctggccaatcttaagaccgtattttacctggacgcccgtcttcagaatgctgtttacatcttcctccagccggtcttttggaaggcggtagttcggtataccgtagcgaagcattccccctagttttggaagcatctcgtatacggttacctgatgccccatcagctgaagataataggccgcgctcagtcctcccggaccacccccgagtacggctaccttcttgccagtgcttttcgcgcatgccggcggatccacttcccctgcgaaatccgccgccactctcttcagtccccggatattgatggaatcgtccaccatgttccgtctgcatcttgcctcgcatggatgctcgcatataaatccgcatgtggtaggaaatggattgtccttgcggatcagccggatggcatccgcataccgcccttccccgaccagggccacataccccggtatatctacgtgcgccggacataaggatacgcatggaaccggctggttatatgtacatgtgcagcgtccgttcttaatgtgctccacataatcgtcccggtatccgatcagccccttatacaccatgttagccgcctcgtatcctatggcgcagtctgccgactccatgatagacagggcagtctgctccatgatatccagcgtctccatggttgcctttccatcaagaacgtccttgatgaaatgattcaactgccccaggccgattcggcatggcacgcatttgccgcatgtctgcgcatggcataactccaaaaatgcccgcgacaggtccaccggacagagtcccggaggactcgactcaattcttcgctctaaatccttatatagtccttccatgactatcttggctcttttcggcgaagcaatctctaacctactcattgtaacattcccttcttcattagttattctgctattgcagttaattctatattatagcactctgtttttttcttgtaagtagttttccataagtagattatttaactttctggtcataattttaacgaaaatgagggcaaaggtttccctctgtcctcatgcatttttccgtgctttactcttttgactgatacagcccccaccagtacagaagcggtatgatatatccaaagactgtgacaaatgtaaacgtgccgtcaacgatagtcattatggtggatataaccatcaggcctgtatagatacctgccgtaataacggcgcctttatagttctttccgcctcttccaaagaatcccgccaggatgcagcagatcgtgctgataagcgatgtcgcgatattcacaggattcatagcagcatcgatcaggctctggtcaatcagtccactgacttttgacatggtggcatatccgatgatgctgaacaccagccccagtattccgaagataatcatcaatatggataccactttcaataatttgttaggtttaaacatactctcttcctccttgatactctttagatttgtcttagtgcttctatcgggctcatccttgccgcctttcgcgccggatagataccgaataggatccctacgccgcaggagaatcctgtggtgagaaggattgctgacagtgacagccttgctgacaggcctcctatcttaagcgcggccactccataggagattcccgctcctataagaatgccgataattcctccgatgccggacagtatcgccgactcgcataagaactgcactatgatagaagaggtctttgcgcccagggacttgcggatccctatctccctggttctttcggttaccgacaccagcatgatgttcataacgccgattccgcctaccagcagggatatgccggctacaaaggcaataaaggccgtcacgccgtccaggacagcgcccagcgtgctcgacatgtccagttccgcctgcttgctaaacaggttgtcgccatcattcatatgtctggaatccagtacctggcaggccgactttgccacagaattagcgctctggccggatttcaggtacagggttgccgcggagaaattccccggggcctccccccatgcttccgagacggtatatggcgtctctatatagatgggcatcttcatgccaaacatctccattgcctcattatttgctgcaatcaattcatcgtccatatccctgacacccataacctggaacgtgacaatggtgctatccaccgtcacatccagttccatgcctacaacatccatatttccgaacagggcaatggcgctgcctttatcgatgacgcataccgggcttgcattctgcatatcatcttcgtcaaaatacgctcctcttacaaccggatcctgaattgggtccttgcctgcatccggcgtcgtgagtgtcagataagcgtcaaaactgccctttctggtagcaacgcttccctggctgctggcgctgcctaccacgccgtctacgcggtctgacagccggtctttcatcgcctgcatatcctcccaggtgatcagctggagattatccgcctcctcttcatctaccttgactgtaacgcttttcggctcatccgtctccataacatccgcttttaatccatttccaatagagataatggtaatgacggatgagatgccgattatgattcccagcatggtcaggaacgagcggcccttattctccttaagattatacagagccatcttgatatattcgccaaactgtcccatcctatcactccttatcagccgtgtcggctttcatgcctgcgtcagaggccttcattccctctttaatgctgccggaagtatctgatacgacttcggtgccttcctttaagcctttgacgatctccaccttgctgttggacgctatgccaagttctacaaactgtttcttaactgtcccattctgtataatatatacaaaattcccatctgtagaagtgttcaccacttcgtttggcaggcataccacattctttttctcgtccacggttatggcaaccttgccgctgacgccgattacgatatcatcatctgcattatcgatgcgtatcttcgccccgatcgtgggatttcccttttcattgggcagcgcgatcttatctaccgataccagagttcccttataggaggactttccaatcttgattgtcgccttgctgccgctcaccagattatcaaagtcattggccggcacttccagaattacattcacgctcttgttatccacaagtgtaaataactccattccctgagccgcctcatttccttccagcgccttcacatcggatatgataccgtcaaactctgccttcaatccctcgcgtccctttgcaagcagctcctctgtcgtcaactgggcaagttccgccagattctccgtcgtccttaagttattcagctgcgcgcctgtaaggctggtatccgcaggcacgctgcgactgttttccatctctgccaggctggctttcaaggagtccagttccgcctgtgcctggatcagcgcctcgctcatgcccccgtcatcggtagagccgatgctgttatattgctgatctaaggcccggtacttggttgacaggtctgcaatctcattggtaagtgtattggccttattcagcttatctgagtatccaggactagtactgtccattccatccagttcccgctgaagattctccaattccgcctttttcgcgtcctgggcgtccaggttcttctgcatctcccccttcaattccgccgctttctgggcattggctgccgcagcgcttcctgcgctttgcgccgcctgggtaagactgtctatatccgcctgcttctgttgtatctgagccttaaggctctgtatgcccgcttccacctgtgcctgggtctgtgcctgagtctgcgctgccctgccgctctgctcgatcgcatcctggctgctgtacttcgcggatagcgtattcagttccgactgctggttatcccgttccagattcgtcgtatcaaagcttaccagaagatcccctgccttcaccacctggcctaccttcacattgcactgggcaatcggggcattgaccgggcaatagaataccttctccttatcgctgccgaccgttcctgtggtgttatatacctgtctgacgtcttctctttccgcctttaccgtctccatctggccgcctttgtcggccttctgtccggatgccatcgctccggcgactccgatgactgccacaacgccgatcaccggtataatggcccatggcgggagtttcttcttctttcctgccggcgctgcaattgcctccagctcatccagagaatcgaagtcttccatatcttccaggcctgcttttgcctgcatctgtaattctttatcttccttcttgctcttcttaaacatccgcttcttcccccttgcttgtcatagcctctcctgtcagatccttgcccgccagattcctgccggtatcgtcatcgctggtataatcctcgttgatatagtcttccacaatctgtccatcctccagccttacgacccttctggactgggcggctatgtccgggtcatgggtgatgacgatcaccgtcttgcctgctttatgcagccctttcaatatctggataatctcggcagtagaatgagagtccagattgccggtaggctcatctgccagaatcaccggtggcctggccgctattgccctggccaccgcaactctttgctgctggcccccggacatctgggacggcctgtgcttcattctcttttcaagccctaccatacagagcgccttcttggataccagccttcttgtcttcctgtctattcctctgtatatcagcgggagttccacattcccgatcgcatccagattctgtatcaggttaaatccctggaagataaatccaatcgtccggttccggatctccgagagttcattgtccgtcattgacaggacatcctttccatccagatagtatttccctgccgtaggaatatcaagacaccccagcatattcatcagggtagacttgccagagcccgagtgtccgataattgccacaaattcgccctcgcagatggtaaggctcacgccgtcaagtgcgcggacttcatcctctcccggattataaatcttatacatatccctaatccgaatcaattctttcataatttttcctcatctacgcttccgctgttctaatgtattaatacaattaattatacacaatatagaaaatatttcaagaataaaacaaaaaaattaaaaaacgcaccctgatttctcaggatgcgcaatattttatacctgcgattatacaagttccaaaagaacttccattgctgcatcgcctttacgctggccaatcttaacgattcttgtgtaaccacctttacggctctcatactttggagcgatctcatcaaagagttttgcaacaaggtcaacttccttggtgttcttcttccttccagctggcgttgccggaacgtcttttaccgggtaaagaaccttcagcatctgacgacgtgcatgaagcctgcttggaagatccttcttgatcttcttgtcaacttcatcgtatacggtaactttcttgccgtctacaacttctttgactctcttgccgtctttgtccttacgggcaacttttgcctttacggtaacttcttcgaagttatccttttcttttacagctaatgcaataaggccttctgcaatcttgcgtacttcttttgcctttgcctctgtggtaacgattctgccattgttgatcagcgctgttacctggtttctaagtaatgcttttctctggcttgaagttctgccgagttttctatatcctgccattttctaatcctccattaattaacacttggttatgcttcatcgggcttactagccaaatgctccgccgcgctctttgggcttaccggcggaaattgtctgtttagttgtatcctattcttcgccatgactcaggcttaagcctaactcatctaattttgcaagtacttcttccagagacttgcgtcccaggttacgtaccttcatcatatcttccggagtcctgtttgtcagttcctctacggtattgattcctgctctcttcaggcagttgtaagaacgaacagataactctaattcgtcgatgctcatctcaagcactttttctttctcgtcatcttccttctcaatcatgacttcggcggcctgagccacttcagacagatcgatgaaaagtttcagatgctcgctcaatacctttgccgcaagactgactgcctcgtccggaagcagtgtgccgttggtatatacgtctaatgtcaatttgtcaaagtctgtaatctgtccaacacgtgtgttctcaaccgtcaggttaacacgttccactggggtgtagatagaatcaatcggaattacggcgattggtaattcgtcgtttttattcttgtcagcgctaacatatcccctgcctcttgtaatggtaagttccatgtagagcttgctgtctgccccgccattcaatgttgcgataactgtctcaggattcatgatttcgatatcctggtcaacctggatatcggctgcggtaaccacgccttctccttcgaactcgatataggctgtcttcggctcatctgtctcagatgtgttcttgatagccagtgacttcaagttcatgataatctcagtaacatcttccttaacacccggaatcgaactgaactcgtgaagaacgccgtcaatcttcacctggctgatagctgcgcccggcagtgaagatagcatgattcttctaagagagtttcctaacgttgtaccgtaacccctctcaagaggttctacaacaaatcttccatactttttatcttctgaaatctcagttatttcaatattgggtttattaaaatcaaacactaagtccacctcctgtggtgttacgggttattatttagaatataattcgacgattaacatctcatctacaggaacatcgatcgcttcacgctttggaagttcttttactgttcccttaaggttctcgagatccgcctcaagccaatccggaaccagacgtccgcctgtaacctctacgatttctttatatcttggagaacttttgtgtttttctttgatttcgataacatcgcctgccttaatcaggtatgaagggatgttgatctgcttgccattcacaagaatgtgcttgtggtcaacgatctgtcttgcctcgcgtcttgttcttgcaagccctaaacgaaatactacgttatccagtctggactcaagcagaaccatcaggttctcgcctgtcatgccgctcatgtgggaagccttcttgaagtagtttctgaaaggcttctctaatacgccatagatgaattttgctttctgcttctcgcggagctgaagtccatactcgctcatctttctattggatctctttaactgtctgttagattttttgtcaattcccaagtatacaggatccattccaagggatctgcatcttttaagaaccggaactctatttactgccatgtttttgctttcctcctatttcaattcggataaatacaatccgtcaacgttgttacaatcagatcaattagactcttctgcgcttcggcggacggcagccattgtgtggtaccggagtaacgtccttgatgcttgttacgtcgattccgcatgcctgaagggcacggattgctgcttctctacctgaacctggtcctttaaccataacgtcaactgatttcaaaccatgtactaatgctgccttggctgctgtctccgctgccatctgtgctgcataaggggtagatttccttgaacctctaaatcccagacctcctgcacttgcccatgaaagagcatttccctgtgcatctgttaatgtaacgatcgtgttattaaaagatgactggatgtgtgcttgtccgcgttcaacgtttttcttgacacgtttttttgtcactttctttgtaactttctttgccataataaaactaacctactctttcctttttattgtttatttctttttgtttgctactgttctcttaggaccttttcttgttcttgcattcgtcttagtcttctgaccacgaaccggaagtccttttctgtgacggattcctctatagcatccgatttcctgtaatctcttgatgttcatagcgatctctcttctgagatcaccttctaccgtctgagtctcatcaattaccgcgctgattttctttacatcttcatctgtaagatctctgcagcgaatatcaggattaactcctgcctctgtcaaaatacgggttgcgcttgttctgccaattccataaatataagttaatccgatttcaacacgtttgtctcttggtaagtctacacctgcaatacgagccatgtgattttcctccacttcctgttttcttagttgttgcgctcagacgcgccgcgtaagattcgcgcacgtcttaaaagtttacatatcgtctttaataggggcttgcgctttgctcgcccaggtacgtttcggtatccgtaccctttccggccaccgtatatccatagatacccggtaatgacgggccggcattataagcaatatacgaggagtatcaccggctaaaggtgtttccttgtatatttcaaatagtctacacgcttcctggcgtgtctactatcagccgcctaaataatgttcgcacaaacttagccctgacgctgtttatgctttggattttcgcagattatacgaacgcttccttttctcttaattactttgcatttttcgcaaattggttttactgatgatctaaccttcacgtcaaatcctcctttcatccattgctctgccttatagttccacgctttccaggtcactaaaagtgcaacaaaagtaaaagcacccagaaacgcgcttatacattatagcactcttgctcaagcaaagtcaatagataatttccattatttatctctccagataatccttcccttggaaaggtcatatggggataattccaatgtaactttatctcccggcaatatcttgatgaagttcatacgcagtttgccgctgatatgagccagcacctggtggccgttctccagttccacctggaacatcgcgtttggtaatttttctactacagttccttcgatttcaattacgtcagcttttgacatatcctaaatcctcctatctctcttcttccttactaaattctttaagtatccgtttaattgctacatcatcacaagcggcgacatcctgcttcctgcatatagcctggacatgccttttcttcttctttttcagatgtcccagggttctaattctgccatccgctaaatatacatatgtctcatcgacgtctattataacgtaaacctttcctgcgtcatgacccgcttttgattttgccagcattcctatttcgtatctgtccatcctgcgtcctcttaaatcactttgataaggtcaaaagtttgggttcgttatctgtgatcaataccgtattttcataatgagctgacagggaatggtctcttgtcacgaccgtccagtcatcgtccagccagtcgacttcccaggttcctgcattaatcatgggctctatggcaagcgtcatcccgcttttaagcttcacgcccttcctgttcatctcatagttcggtatctccggggcctcgtgaagggccgtgccgattccatgcccgcacaagtcgcggacgactccgtaacccctttcactggcgtatctgccaattgctgccgaaatatcaaatagataattgccttctttggcatattttataccttcaaagaaactttcccttgtcactttaatcaagtcttctgcttctctgctgatctccccgatgccgtaagtccttgcggcatcagaatgatagcccttatagatcacgcctgcatccaggctgaccacatcgccgtcctgaaggatgcggtgcctgtcaggaattccatggaccacctcgtcattcaccgacacgcagatggaagctggatatccattataatcaaggaaagatgggatgcacccataactccttatgacttcctctcccagctgatctatatccatggtactcattcccggatgcagggactttgctagttcatcatgaacaatctctaatatacgtccggcttctgtcattaattcaatttctctggccgattttatagtgattggcatgttcctacgctcctaatatctctacaattgcctggaatacatcttcaatgtctgccgtaccatcaacggtcttaaggattccggcttttgtataatagtcgatcagtggctgtgtctgctcatggtacacattcagacgatttgtaaccgtctccggcttgtcatcatcccgcaaaatcagttctttgccgcatacatcgcagatgccctccgccttagtgggggcatactcgagatggtatgtagcgccgcatcctacgcacgcacggcgtcctgacatacggcgtacgatattctcatccggcacgtcgacatcaatcgcataatccatcttttctcccaggtccgtaagcgccttgtcaagcgcctccgcctgcggtatcgtcctcgggaacccatccagcacgtatccgttcttgcagtcctcctgctttacgcggtccacgacaagatctaccaccagctcgtcgggtaccagaagtccctgatccatgtacgtcttggcttttttgcccaattcggttccattcttaatattcgctctgaagatgtcgcctgttgaaatatgaggaataccatactttgcggcaattttctttgcctgagttcctttgcccgctcctggcgcgcctaacatgattattttcatatacgttcctccttatagcattttaacccgcgaaaaaaatcccgcgagtcaaaatgttagttatttaaaaatcccttgtagttacgtacaagcatctgtgattcaatttgcttcagagtctccaatacaacactgacaatgatgatgagggaagtgccgccaaatgataccttggctcccagccatccattgaaaagaattgggacaacctgtacaagtacaagtccgcatgctccgataaagataatgtagttcagaatctttgtcagatattcaaccgttggcttgcccggacgtattccagggatgaatccgccgctcttcttcatattattcgcgatctccagcggattgaatgtaattgaagtataaaaatatgcgaagaatactgtcagcacgatatacaggatcaagccccatgtatacttaagctgttccggattgcaccagttgctctggtttaatccgcgcagaatctcgctgccgattcccgatccgttgcctttcctcataaaggaagcaatcactaccgggaactgcatcaatgatgatgcgaaaataatcgggattacgcctgcagtattgactttcagcggaatgttcgttgactgtccgccgtaggttcttcttccggctactttctgggaatactgtactgcgattcttctctcaccgctctggagaataacaacgaatacgacgagcgcaatgataatcgccaatatgatcacaaccgcaagtgctgctgatgcgatcggcttgccctttacaaactgttcgaacaatgcagtcatatcgcttggtatccgtgatatgatattgattaccagcacgatggaaataccatttccaacgcctttttccgtgattctctcgccaatccacatcaggaatgcggatcctgccgtaagtgtcagaactacaattgccgcgttcacaaaattatactctaccagaagtccctggcggccaaaccctactgccatcgcaagggattcgatcagtgccagtgcgacggtgagataacgcgtgattgcaacaatctttttccgtccatcttccccttccttttgcatctcttctagttttggaatcgcaatcgtaagaagctgcataatgatggatgaagtaatgtatggcgtaatgctcagagcaaatattgacatctgctcaaaagagccaccggtgaaagcgttaaacaagttaaacgcctcaccagtgttctgtgcaaaaaattgctgaatataattggagtctacccccggtgttggcaactgtgatccaattcttattacgattaacatcaaaaacgtatatccgatcttcttgcgaatatctttgatatgaaatgcttttcggaatgtctctaacattagatcacctctgcttttccacctaaagcctcaatttttgctgcagcgcctgcgctgaatgcatttgcctgtacggtaagcttctttgtcagttcgccgtttccaaggatcttgactccatcctttggattcttgacaataccctgctcgatcagcgtatctacagaaacaactgcgtcattatcaaatacttccagagcgcttacattaataccaatgatttctttagagtttctgcaagtgaatcctctctttggtattcttctatataatggcatctggccaccttcaaaaccaggtcttgttgctcctgaacgagccttttggcctttatgtcccttaccggctgtcttgccatttccagaaccgtgtccacgtcctcttctgaagttatcattgtgctttgctccgtcagcaggtcttaagtttgataaatccattgtgacacctccttatctgaatttttattactatgcttcttctacttttaccaggtgagatacctgtttaatcatacctcttgttgctgcattgtctggcagttcaactgtcttgtttacttttctcaagcctaaagcttctacagtcttcttatgctttggtacagcaccaattgtagatttcactaatgtaacctttaaatttgccatcttaatctacctccttagcctaagatctcttcaacagatttaccgcgaagcttagccacttcttccggagtcttaacctggcgtaagccatcgattgtagccagaactacattctgcttgttgttggagccaagagattttgtacggatattcttgattcctgccatctcgattacggcacgcgccggaccgccggcgattactccagtaccttccggagccttcttaagcagtacggaagcgcctccgaatttgccgataaaatcatgtgtaatactttcattatcatccaatgctacagtgataaggtttttcgctgcgtcttcttttcccttgcggattgcttccgggatttcagtcgcttttcccaagcctgcaccaacatggccattaccatcgccaacaactactaaagctgtgaatctcatattacggccacctttaacaactttggttacacgcttaattgataccactttttcatttagctctaactgactagcatcaatacgttcttgtttcatgtgtgctcctccttctagaaattcaatccagcttctcttgctgcgtctgctaatgcctgaatcttgccctggtatataaagccgcctctatcaaagactacatccttaatacccttttcaatcgccttctcggcaatcacttttcctaaatatgctgctgcatcaacgttgttagttttttccaattctgccttcacatctttctgaagagtggaagcggaaaccagagtatttccaactgtatcgtcaataatttgagcatacatatgattattgcttctaaacacagccaaacgtgggcactcaggcgtgccacttaaacggttacgtattcttctgtgcttctttacgcgaacttcacttcttgattttttgctaaccattttcacactctccttacttatttcttaccagtcttaccaactttacgtctaataacttcatcagcatatttaatacctttgcccttgtatggctcaggtcttctcttatctctgatttcagctgcgtattggcctactttttctttatcgatacccttgacgataatcttgttctgtccttccattaccgtctcaacgccttctgggtcaatcatctctactgggtgagagtatccaagacttaatgtcaacttgtttcctgattttgctgctctatatccaacaccgtttacttccagaaccttctggtatccgtctgtaacgccaacaaccatgttgttgatcagtgttcttgtaagaccatgaagagatttcatcttctttaagtcgttcggtcttgttacaacaatttcgtcgccttcctgcttgatttccatctctgccggaagttctttttcaagggttccctttggaccttttacagtcactttgttattctctgcaatctcaacagttactcctgctggaactgcgattggcagtcttcctatacgtgacataccttttcctccttaacttaaattttcggaagagcggctttgtgtggctcttctgttttcagttacttctttgttgctttcggtttaccacacgtagcagagtacttctccgcctacgcccagttttcttgcttctttgtctgtgattacgccgtggtttgttgagatgattgctgttccaagtccgccgaataccttcggtacgtcagcgcttccagcataaacgcgaagtcctggcttagagattctcttaagtcccgtgattaccttctcgttcttatctgctccgtatttcagcgtaatacggatggtcttgaatattccatcttcgatgatgtcatatttctcaatatatccttcatccagtaagatgctagcgatagcaagcttcatcttagatgatggtacatctactgtatcatgtttagcagtatttgcattacggattcttgtaagcatatctgcgattggatcactcatagtcatttgtcctatacctccttcattatgaagttctcttcactaacgctcagagaacggcctgctcactaagttcggctccgcctctctaagtgttcagtgcctaccaactagcctttttaacgcctggaatctgtcctttatatgccagttcgcggaagcaaacacggcagatgccatattttctcaaatatgcatgtggacgtccacagattctgcaacgattgtattctcttgtagagaatttctgcttgcgctgctgttttaatttcatcgctgtcttagccataatttacctccttattttgtaaatggcatgttgaactgtgctagcaattcacgcgcctcttcgtctgtttttgcagtcgtgacaaagattacatccattcctcttaccttgtcaaccttatcatactcgatctccggaaagataagctgctctttgatgccgagggcataatttcctcttccgtcaaacgcgttagggttgacgcctctgaagtcacgtacacgaggcagggcgaggttgatcagacgatcaacgaactcatacatcttctctccacgtaatgtaaccttgcatccgattggcataccttctcttaacttgaagttagcaacggacttctttgccttgcaaataactgccttctgacctgtaatcttctcaagatcagcaactgctgaatctaaaagcttagcattatcttttgcttcgccaacacccatgttgataacaaccttttcgagttttggcacttccataatatttttataaccgaacttttttgtcaatgcgtcaacgatttcgttctggtattgttctttcagtctactcaaagcactggacctccttcctcaaattaatcaattacttcgcctgttgattttgcgtaacgaaccttcttgtcaccatccatcttgatgcccactctggttgcttttcccttgtgaacatacattacgttggaaatatcgataggtccttcttgatgaatgatgccgccattttgattggaagcacttggtttcgtgtgctttgtcagcatgttgactccttcaacaacaaccttaccatctttctggtcaatggcaataactttgccttctttgtctttatctttgccagcgatcacctttacagtgtcgccctttttgatttttaacatagacatctttcgcgcacctccttatagtacttccggagccagggacacaattctcatgaactgcttgtcacggagctctctcgctactggcccgaagatacgggttcctcttggtgtcttatcatcttttataattacagcagcattttcgtcaaaacggatgtatgagccatctttacgacgagtactctttacagtacgaacaactacagcttttactacgtcaccctttttaacaacgccgcctggtgttgcatctttaacggtcgcaacgattacatcgccgatacttgcatatcttcttgttgaaccaccaagtacgcggatacacagtaattctttcgcacctgtgttgtctgctactttcagtctgctttcttgctgtatcatgcaggtttccctccttatactatttcactttttccataacttcaacaagtctccatctcttgtccttagataacggtcttgtttccattacttttactttgtcgccaatgttgcattcatttgcttcatcatgagctttcagcttgtaagttctctttacaatcttcttgtaaagcggatgttttacatgatcttcaactgcaacaactatggtcttatccattttattactgataaccttgcccacacgggtttttctaagatttctttccacagtctatactcctttcattgtgaatgaagttcttttcgccaagcctgacagaacctcgctaatcactattgtcctgccttttcagtaattatcgtctgaattctggcaatgttttttctgacttccttgattctgcttgtattgtctaactgatttgttgcattctggaatctcaggttgaaaagttcctttttagcagctactaattcttcattcaattctgcagctgattttgttcttaaatcttctacaaattcattaattttcactgttatcaccgccttctaagtctgcgcgagaaactattttacatttacatggcagcttatgagttgccagacgaagcgcctcttttgcaacttcttctgatacgcctgcgatttcaaacataacgcgtcccggcttaacaaccgctacccagtattctaaggttcctttaccagaacccatacgtgtctcagctggtttcgtagttacaggtttatctgggaatatcttgatccatactttaccgccacgcttgatataacgagtcatagcgacacgggcagcctcgatctggttggaacgaatccagcatggctccattgcaacgataccatattcaccatttgtaatcttgtttccacgaagcgccttgcccttcatggaaccacggaattgtttacgacgttttactctttttggcattaacattatttatcgctcccttcctttgctgctttttccggaagaacttcgcctttgtaaatccaaaccttaacaccaacttttccataagttgtgtcagcctcagcgaatccgtagtcaatgtctgctcttagtgtctgaagcgggatggttccctcgctgtagaactctgtacgggccatatctgctccgccaagacgtcctgatacagatgtcttaacaccaagtgctccagatttcattgttctggacatgcaggatttcattgcacgcctgaaagagatacggttctcaagctgtaacgcgatattttccgctaccagctgagcttctttatccggtctcttgacttctttgatgtcaacaactaacttcttatctgtaaaccgaactaactcgccttttactttctcaatctctgctccgcccttgccgattactacgccaggctttgctgtatagataatgatcttaacgcggtcggatgctctttcgatctcaatccttgaaacaccggcgctgtataatctcttcttaagatacgttctgatttcatggtcttctactaagtagtctgcgaagtctttttcagcataccatttagagtcccagtctttgataataccgactctcaagccatgaggattaactttttgtcccatgattgccctccttatctttcatcaagcacaagtgtaatgtggctcattctcttctcgattctgtaagcccttccctgcgctctaggtctgattctcttcattgttggtcctttgtttgcataagcctctgcaatataaagattttcagcattcataccgttgttattctcagcatttgcaattgctgactctaataatttctttattaaactagaagcatatcttggattataagttaaaataccaagtgctgtcgttacatccttacctctgatggcatctaatacgaaacatgctttctgaacagaaactcttgcgtaagacaacttagcagaaggtcttgtatctttgttagcatttctttctctcttgatttgggatctatgtcctttagccatggatgaaccctcctttcacaatgtaattatctaacttttgatttcttttcgtcttttccatgtcctctatatgtccttgtagctacaaactcgccaagcttgtgtcctaccatatcctctgttacatatacaggtacgtgttttcttccgtcatgaactgcaattgtatgtccaaccatgcttgggaagattgtagaacggcgggaccaagtcttgatgacagacttatctccggatgcgttcattgcatcaaccttcttaagcaggcttgcgtctgcgaatggtccttttttaattgaacgtgccataggttctaacctccttgtaaactgtattatttgatcgctttgccatctcttcttcttacaatcatcttgttagaagctttgtttttctttcttgtcttaagaccaagtgctggcttgccccaaggcgtgcatggacccggacgtccgattccagtcttgccttcgccaccaccatgcggatggtcattcgggttcataacagaaccacgaactgtcggtctgatacccatgtgacgcttacgtcctgctttaccaatgttgatcaggttgtgatctccgtttcctacaactccaacagatgctctgcactgaatcggaaccattctcatctctcctgatggaagtcttaaagtggcatacttgccttcttttgccatcagctgagcgctgtttcctgcggaacgaaccagctgtccgccctttccaggataaagttcgatattgtgaatctgagtacctaccgggatctcagaaagcggaaggcagttgccaacctttacttcggcctctggtccattcataaccttcatgccgtctgtcagtccctgtggcgcgatgatatatgctttttcaccgtcttcgtagcagatcaaagcgatattggctgatctgttcggatcgtactcgataccgattacagttgccgcaattccgtctttccttctcttgaagtcgataattctatatttcttcttagctccgcctccgcggtgtctaactgtgattttaccttgattgttacgtcctgcctgtctggtctttggagccagtaaagacttctctggcgttgtcttggtgatctctgagaaatcagagccagtcatctgtcttctggaaggcgtatatgggcgataggttttaattcccatgatagttctcctttcgattgtttattgtcacggtttctatccgtatgaattcacgagttttattctcagcgctcagttcctataacccctcgaaaatctcgatatctgcgctgtcctctgttaactgaacaactgctttcttagactttgccgtctttccgaactgcattgttccgcggactctcttcttcttgccagcgtagttcattgtgttaacgctttttacttttgtgccgttaaacatcttctcaactgcttctttcacctgagatttggttgcttccggatgaaccagaaatgtgtatttcttttctcccataagttccatgctcttctcagttacaactggcttaaggattacatcataatattgaacgttagccattatgcgtacacctcctcaatattggcaacagcagctttcgttgcgattactgtgttgtacttcaagatgtcgtacacattgatcgtattagatcttgcagtcttaatgtctgcaatgtttcttgcggaaacttctgcatttgtatttccatcttctaatactactaatgctttggatacatctaaattcttcaggatatttgcaaaattcttcgtcttgatctcatcaatcttgatctcatcaacaacgatgaacttcttctcttctacctttgctgtgagagcggatttaagagctgctctcttctctttcttattcatcttgaatgaatagtctctcggcaccggagcgaatactactccaccgcctgtccactgcggagctcttgtagaaccctgtcttgcgtgacctgttcctttctgtctccatggttttctgccgccgccggaaacttcagaacgtgtcttcgctttctgtgttccctgacgtttgtttgcaagttggtttacaactgccatgtgtaaaaggtgttcattgatctcaacaccaaataccgcatcgcttaaatccatcgtaccaacttctttgccttcgatattataaacagatacgttagccatcttacgtgtcctccttccttcgcctagcctagttagcctttactgcttctttaatagttactaaggatttcttcggtcccggtacagagcccttcactaaaatcaggttgttctctgcgtctacacggacgatctcaagattctgaatcgtaatcttcttgcttcccatgtgtcccggcatcttctttcctttgaataccttgctcggatcagaagccgctccgttggatcccgcatgacgatggaacttagaaccatgtgtcattggacctctgtgctggccatgtctcttgatcgcgccctggaatcccttacctttggagattgccgtagcatcgatcttgtcgcctgcctcgaagatatctgccttgatttcctgtgcaagttcatattctcctgcattctcaagtttgaattctcttacgaatctctttcctgaaacgccggcttttgcaaaatgtccctgctcagcctttgtcacgccatggcgatgagcgatctctttcttgccgctcttatccttgtttacaatcttgtctttcttgtcaacgaatccaacctgaaccgcatcgtagccatcgttttcaacagtcttgacctgagttacaacacacgggccagcctgaagtactgttacgggcgtcaatgttccgtcttcgctgaagatctgagtcattccgacttttgtcgctaaaatagctttcttcattataattacctcctgtgatttacagcggaacgcttgtgcaagcgttcatcctaaattttaggaattactgtgttcttatttgtttttcattttgatatcaatataaacgccagccggcatctctaatctagataatgcatccacagtcttctgtgtcggcgtaatgatatcgatgagtctcttatgagtcctttgctcgaactgctctctggaatctttgtatttgtgaaccgcccttaagattgtcactacttccttcttagttggaagtggcaccggcccgctcacctgtgatccattcttttttacagtttcgatgattttctttgcggatgcatcaaccaactgatgatcatacgctttcaaagtgattctcattacttgacttgccataaaaaaagtcgcctccttttcgtacttttaacttcagtacgacaagcggtgactgtacactctcccgtgtgtgtcgtgagaaactcacacgttgttaccacatctcagtggctgttatagtttcgtacagtgacttgtcgccagtttcctaacttgacattcgctccacggaaaacctactatatataagtagcaacctcgcgcttctacgctatcaatgtcacagccctcttagtatatctgatgggaaagtattttgcaagccttttcggggaaatattgcattttttttcatacaatatcagtctttcctttacattttcccttcggcacatagtttcctattttatagaaaagaaaatcatttgtcaatcatcatccaaagaacaccttatttacgttatttaattaacatttataggttctccgcccagtttttgttaggcattttcgataaatctgattgactttttctatagaaattggtaaaattagaaaaagaacagatagtattaaatttaacgaaatatattcatatcggggtgcttatatttcaatgtcatatagttgattatctgttcctatttttttgatacatttaaacaatctggagggatgaactatgaacgttattatgattttacgtatcgtgctgggactctttgcattagtatctttaggattctttgtaaaagacctgcttgctcacaaagaagattttacaaaagaaaaagccgtacctttagcaatcatcggctgcattaccaaccttcttgatacatggggaatcggtagttatgcaaccacacaggccgggttcaaatttacaaagtcaagcccggacgagacaattcctggaacactgaatgttggagatacattccctgtaacattggaagcattactgttcttcagttttgttgacattgatccacttaccttagtattaatgcttgcaggctctgttgttggtgctcttgttggtgctggtatcgtttgtaaatggaatgttaagtatgttcgtattggtcttggtgttggtcttatgattcttgcagtcgtaatggcttgcagaaatgcaggtgtaggacctttcggtatggctggtacagcattaggcttaacaggaatcaaattagtaattggtgttgttgttaacttcttcttaggcgctcttatgatgatcggtgttggtctgtacgcaccttgtctcgcattagttagtgcactgggaatggaagttggaactgctttcccaatcatgatgggatcttgtgcattccttatgaacgctgcttgcttcaagtttatcaaagaaggcaagtacgacagaaaggccgctttctacttggcagtattcggatgcatcggcgtatttatcgcttacaaggttgcatgtatgttctcactgaagacattgacctacatcatctgtgtagtaatggtttacacatctatcatgttcttcagagatgctaaaaaggcagcatagttagtaatcgcatagtttatataaagatatccaaggatggttcctcccgaggagccatccttttttctattcctttcatctgcacatttaaaattgcctcaaaacatactctttttttagtaattagtcggtactttgaataaaaatgaaaatgggctattgacactagatttcaaaagtgatatatttaaaccaacttaaatgtacgacaaccaacggcggtttcccattgggaggaaactgcttattttttaaaactgccgtacattaagttgtaaccgttttggttgttattgcagttacgctattgccgatcatttcccccaagaacggtcctgcaatggtgaacttcaatttatgtatacatcctctttacgaggagcattccccagcttttgtatataagacaaaactgcaatgcaacgaggaaaacctctcaatgacataccaaaaagaaagggcacgacatacctatatgtcgcgccttttctttgcttttaattcgtcaataaattaacacgatgcataactatacaacagatgctactttttctcattctttcgcatcttaagtttcagaagcgcagtcgcctttttgcaatccagctcgaccatattgttttccccaaccacattggtctctgtcccgtccgcgctcttattgatatccacaattccatccaggtaattatttacaactacaaattgagctaccgtaccgctgaaattaaggcccgtcaccgcgatgcctctcgtccccacctgctcgcatgtattcgtgtaatccacgtcgctgtttccccatccgtccgaagagatgattacgccgtccgcacgcattgcctcggcccaaacagccgtcctggttcctacaagcatcttatcctcattatcgtccggtgttcctacgatgataattcccatcagatccagatctgtatccgaagagactacatccagcagcggatccctgaagtgatgcaatgatgtttcttttgttgatggtcctatacccatattaacacctcctactgcatggagcggataataccgtctctgtactcatttggagttacaaggatcggcatattgcccatatcgataattgaacgtccgccctctacgccagacggctctttggaaaacagatgcgtatcatacattgctccctgtcctgccacctgctttacgatcaggacgcgtttctttcccggccttaccacatcatggtactcatggcgttccgtacacttctcgcctttgaacttcttcatcttatcacggtatgtctggataaacttatcgcacgccctatgtgcggcagtcggtccaggcctctcctgccccattccggctgcaagcgttacatcaaaggaaattatgtaatcatcatcccccggcgtgcctgcacggttcaagtacagctggtctttcagactcccctcagaagaaccgaattcatggcattgctttccatttacgtcaacgccggtaagcattacatatacgccggtaatggtatgggtaatgccctcccctaattttccaagtacctttgtagagatcggtatgatatccataatcgtattcgtccaacggtcatgatcccccggcttaataatctgaatatcaattttttcaatgtgttcctcctgagccaccagctgatcaatcatttctttactgactgtcatattaccgtcaacagtaatatcattatgttcaccccactctacatcattcatgtggaacgctttaattacaagacgtctcaggtcttttacctcttcagccaacttaagtcacctccgatatttaataactactttcatgaccttattacaatattacggattcttttccgatatattgtcatatcctttttcaaaaaagggcagatgacaatccatctgccccttatttaatgaaattaaatcttagctacatactcgaatggcagtggaacaatctttccaggtgtctggatttcaactaactgctccagagttgcctttacgatctgtgtctgctgttcaacattgtgcggtccacctgcattagcacccataggtaccaatggagcaactgcacgaggagtaccagtctggcgaacaactggtggaagagctgcaataataatagtaggaattccagcttcttcaatcgctctctgcaccaatactgcagagcggtggcaggttcctcagccagcggtgagaattactgcgtcaacgtcctcttctttgaacatctgcgcgatagccggaccagtttcgcctttgaacttctcctggtttccgccaccacccatgaatcctgcatgtaccggagcacaagccctgataaatccttcagcagccaattcatgaattctgtcaattgggaacatacagttgatatctttgttaacatcactgttatcatatccaccatgggataccatcagttcgctagatggtgttgtgttctctatttttctccatgtaaagtcaccagcaagattgaatctttcctgatccttcttatgaacaccggcagctgttgcaagagcgatagacatgtctttcaactcttttgttacaggagtccatactgatggtggagtaataggaacgaatatttcagattgtaaacctttaacaaccgttaaactcatttttagacctccttattatcatccaaacgtatgcgcatctcttcttgtttgcgccgttctttttctatgttgctgacgtatttgtcatttatctccggtcccaactgttccggaaaactcatgttccatccgaattcctgccccaccttcggctcagtatcacagataaacattcgtctcggtgctttgaagaaccctaagcgtcctttcaagtctacgctgatactgcagtcatcaacgtcaacgacaacaccttccatgtaaatgactctatcgccataattcaaacgttcattattcattcgcgggcacccggcttagctgtattttaatctacgtttttcactcatcggaagagcctgctcattttcaacaagatcaacctttgtaccgtatgtgctctcaattaactctacgtttgtagacttaacgtttggattccacttcttctcagcagccttaacgtcttcgcctgccattgcagtcttaagcatagcaagtgcacgaacagcatcttccgggcaaagcgtattgttaccaagaatctcgttctcgataccagcttcagacttgttattgtcaaccatgtatgtcatatacttgttaccaacaaccagagcgccctgaactgcacagtaagacatgccaacaaccggaattcctctcataccgatctgctcgatatggcttgcgaaatcgatgtggttgtttccaaaaccttccgttgtaacgaaagctccatcagcatccatcatttctacggtatgacctacacgacgggatacatagaatttctcagcattgatctgaggagatcctacaaatacaacaccgcaaaggtcaacttccgggtcatgcaatgcttccagaaccaatggctctctccagtaatgtctggacatttccttagatgcaggtccgatacatgttaatgcatggatacatccatcaagaacttccaatggagatacgcaaaccggtacgtttcctaagtctacgttagctcttgcgcctagaacgccaacaggctctacaggaaggataaagttgtcatgcatagctccctgtcccatgatttccttaacgataacgactttcttcttgcccggacggcgaacctgcttcagttcttccgtatcagcaacaaggctgtcatcaagtttcttcataacttcgcggatttcctgtgtgattacatcaaatgctgtatgagcagccataggtccacgacgttccatgtttgtcttttcctggattacgatgttacccttgataaagatctcgcctttatctgggcagctcggacgattccacataatgttctcatcaaggtatccttctgaagaaccgaactcaccaatctgaactccgccttcgtcaacacctgtcagcatcataacaacgccgtcaagtactcttgtaacacctgttccgagttcatcatcgccttcttttgtagcgattggctgaacgtccataacagtctcggaatatgtgtgatataaatcaggagtgatgatttccagtttgaaatcttttacaagctcctggttgtcaataacttctgactcaatgccttcacggatgtaaagagttgttccttcgatcttggtctctggccctctcttaacctctgtgatcgtgaagtgttttcttgttaaacttcttacaaccttttcttctccagctgcttctggtgctgctgctcctgcaacaactgcctctgctcctgccggcaatggtgcaactgctgctccgccgccaagcgctccaactgggatctcaagatcaatgtccttgccttctccaatgtggatcttaagtgttccgcctgccgcaggtcctgctacaggtgctgcagccggtgccggtgctgccggcgcttcctcttctgcctcttctgctgctggagcagtcggcgcttttgcaccttcaactacatctgcagttaacgggcaaagagaatcacatgtttttgtaagttttgctcccaaaacttcttcgatggtcaatgcaccatccaggttcaataatcctgaatctaccaagtcatcaaagatcgccggatcttcaagattagcagcttcgattgtaatgcctgcttcggctctacaacataataccgcaggatcatgagcatgttctttcgctgtttcagctgtgattgacatattgttttccctccttgtttggtttgcataaattatatatacagttacacatggcgcggagaatacctctcgccttccccaggcaaaagaatcgggggtcccttgcccttgccatctgcaacagtaataccaataagtaacttagaccttatttgccgttgggcagctggtcaacttctttggacacggtcagtcttctgtataatggatgaccgattgttctcatcacatggtctgtctgatggaatgtcttcagttttaactttggtgcagatcccataactgtgttggaacagtctgagcagttaccgatgatgatgtactctgcgccgtccttcttaaactgcagacatttctgtgcctgtccaggacagtttcccggattctcgcacttaagcgctgcgcccggcttcggctcaaccgcctgtttacatcttgccacagaaacgacctttccattcatcttttcgcaaagttcgcgcatacggtcttcgcttccgccgcacgcacagacaagcaatcctaccggcgctccgtgaagatccgggaactcaaccgttacgatgattccgcctgtcgtcttcgtagtgggcgcgtctaatgtggtggactttccagtaaatgctccacccatgataatctcgccatatgtaccatcaattccgcctgccttctcgatcatgtctgcaacacaggttccaaccggaacatccatgaatacatgcggctcgtttccaccgttaatctttccaataaccgtcatattcttgctaaagcaaggtttcttaagttcgatcgcctctgcgatacgaagcagggtctcgcaattgattacgactgcatctgctgctgacggaagttgtgtaggatcaagcagttttccgaggcattctcttactaccgctctttcctctcccattgggtaaatatccggaagaagatggatcgtgatattgtcttcatccttgattgcctctctgagaaattcgatcgctttttcgttcttcttcttaatagcaataattccttttgccgcattggatatctccatgcagtatttcaatccgcggattgtgatatctgtcttttcttcaatctgctggatattgtggcgaagtccaggctcgcattctgcagcatttaccaggatatatccgccgtgaaggtccgttccaatcttcacgccagttgggaatcctgcgccgcccatacctacgattccggcttccttaaccatctcaagcttgctgccttccttaataggtacaaactcatctttctgctcttcatccggcttgataacgattcggtcttccaagacttcttccaccacgccatagacgctggaaaagatgttagcgccaagtcctgtaggagttgcaatcaaggtacctttttccaccttatccccagcctttacgattgcctcacagggtgcaccaacatgctgacgtaacaaaatctgtacatttcccatgacatccttctccttttcttttttaatataagtaaaaaacgaaactatagtagtccgtttacttattccccagatatataaattctatctataagtgtttgattatacattcgccaattttttaacattaaataattactcttttggcggaggcatgtgggaatcgaacccacccaggacgctcttaacgccccacactagttttgaagactaggaggcacaccagtcacccatctacccccatgacttacttctcatgcgaattaacaataacacactttttcggagatttcaaccgtttttatttatttttatactaccaaaaaaccattgacttttcaaggcttatcgtacataataaatgtagtgaactgaacgcaatactagaacgcggtctaattgttaattttgtatcgttttcaggtggttcattgggtgtttttcgaaaaaggcactgcgagaacttgggggttttcaatgtgtttttataaaaacttatagaaagagtctataagtaaatttaaggaggtaacgattatggagttaaaagcaaatgttaacttcgaacggtttgaagcagcattacaggtagtagacgctcacaccgttggagaattctgccgtgtagtaatcggcggatttccagagccagaaggcagcacaatgattgaaaagaaaaaatggatggagaagaactatgaccaggtacgtacagcattgatgttcgagccaagaggacatcatgatatgtttggggcattcctgtgcaagccagtcaatccagaagcagacttcggcgtaatgttcatggatacaggcggatacctgaacatgtgcggacactgcacgatcggcgctgtaacggttgcgattgaggcaggtcttgttgaatctaaggaaggcgtaaaccaggttgtactggaagcaccggccggactcatccgtacagaagcagttgtgaaagacggcaaggttgagcacgttacattgactaacgtaccggcattcgtttacaaagagaacctctccgttacgatcgacggccaggagattccatttaccatctcctttggaggaagtttcttcgcattagttgatactacaaagatcggtatcacagagatcagcccgaagacagttccggacatcactaaattaggaatgaagatgttagacgtaatcaacaaagagattccggttaagcatcctcttcttgacattgatacggttgacttagttgagttctacggaccaacaccgaatccggacaaggcaactatgagaaacgtagtaatcttcggagatgctatggctgaccgttctccttgcggaaccggtacaagcgctaagcttgctactcttcatcactggggagagatcggcgtaggcgaggaattcatctatgagagtttcatcggaaccagattcaagggcgtaatcaaagagacaacgaaggttgctgactacgatgcagttattcctatgatcacaggcagctgctacctgaccggtgttgctacatacttgattgatcctacagatccattgaaatatggcttccaggtaggctagtattctatcccagttagaatagcgatacacaaaaaaatgaagcggattagtcataatccgcttctatttaaattaaggcaggaaaggaatgagtgccgatgccacgtaaacgccaatccaccaagagccgcattgtcaaagcggcatggaatctgttctataagaacggatatgaccacaccacagtagaagacattatcgcagcgtccaagacatcaaagggcaccttctatcattacttcaagggcaaagaagctcttttgaattctttatcctatctgtttgatgagaagtacgaagaactggccgcagtcattgacccgaatctgtcagcttatgacaaactcctgtttttgaatcatgaactgttctatatgatcgagaccagcgtagatatcaaattgctggcatttctctattcatcccagctgatcacgaaggacaaaaagtctctttcagacggcaagcgtttttattttaaatgggtgacggagattctttcggatggccttaagcggggagaattcaaaaacaccagttccgccgaggaactgatgaacatctatgctatgtacgaacgagccatgctatacgactggtcgctctttaagggcaaatattctttatcggaatacagcgacaggctgcttccccatgtactggatacctttgttgaaggagtatagaaatggatttgtctctaaaaataagggacggaatcttctgaccttggatatgcctgccatatcccagccggaagcaccgtccctttttgcttgtttgcctgcgcttattcacctacgctttcccagactttctcatctaaaccatgcattcgtgcatttcttcttcctggattccgacagactgcattacctttacaatctgctccttatccgaaagttccgcgcaccaggaaaggccgcagccagccgatatggctcttggaaccgggataattcttcccgacgcgttctgttccttgcatgctttttccatagccatggcatctgccgtggtatggaatgtcactaccagttttaactctttttttctcattgttattcaatcaccacttcaaagtatccgtctttttccccggatgtagcctttttcccatggtcctttgcatacttttccacattcattttctgatgcggctctgttaccagtatttttacaggctcagacgcccctttcaaggcttccgctgtaagcattaaaggctccgggcaagaaaggcctcttgcgtctacttctttcatacttattacctacctttctagaatactatgtataagtcaatatatcaacactattttgcttctttccgcctattcgtgaacgcaattacgaagcacaatgcaatacagatgaagcatgcgatcttgccattcattggcactgctccggcaaccacttcctgcgtctcaggatttaaagcggttccgctggccgcaagccccaggttatggcacagtgcagcacctacaaacataccggcaaccgtaactgccgaatcagaagagccttgtcctgcaaggatcaactggcgcagagggcagccgcctgccagaacagccgcaaatcctaccgcatacattccaagaatattccaaatatgttctgagtgcgctataacacccggggtatcaaatcccaatacgaagcgtcctgttgccacattaaatatcagcattaccacaaataatccggcaatcacgctgaacagatcaaagttcttcatcagaataatatcacgaatgcttcctgcaaagcacatcctggatttctgtgcaaatgctccaaacaccaggccgcctatcaatgccgctataatcggcgcatggacgcttcccggccctgccgtgctggatttcagaagcgtggtgcataatgccagaatcaaaatgccaactacgatcactgatatgactgctccgctctctttgttggtcacataggcacgcccaagactaaatcccttcttaagcgcaaatacgcccgtcgcgactccaagcacgaatccgatcaatgccacccaggcattcagatcgcctgctgacatgcggattaccatacgtaaaggacagcccaggaacaccagtgcgcctatcattatgatcattcccagaacgaatctggtcattggggaagaccccgccgttgatcgatattccttagtcgccactgatatcaaaaatgcccccagaaccaggcctataatttccggcctggcatactgtactgcctccgcctgatgcattcccaatgcacccgccgtatctctgataaagcaggcgatacaaaatgccatgtttgccggatttcctaaaaacgcaagacatgccgctacaagtccgcatactacgccggccaacgccagctttttcttcgagtctgataaattcatgttaatccctcctgtactttttctcaatcctgcatagatcctttaatcttctgcaagttcctggatcgccctaatggcgatatccacttcttcatccgtattataatgtgaaaaactgaatcttacagccccctgctccacagttccaagcgcctcgtgcataagcggtgcacaatggccgcctggccttgtagaaattccatattccataagaagttcatcactgacttctgaagaatcataatctccgatattaagcgttacgatcgcacagcgattcatgtcatcaaaatctccatatatcttgacgccaggaatgtctttgacaccctcatagaacctcttcatcagtttctgttccctggcgcggatgctatccactccttcatcttcaatatattttaatgctgcattaagccctgcaatgccatgtccatttaatgttcctgcctccaaagcggtaggcatctgttccggatgggtcttgctgtacgtcatgatgccgcttcccccgctctttaacggacgcacggacagtccttccctcacgtacattcctccggtcccttgaggacccagaagtcctttgtgccctgtgaagcacagcacgtcgatatgcatgtcctgtacatttataggaaacacgcctgccgtctgggatgcatctaccacgaacaaaaggccatgcttatgggcaatctcgcccactctgcctatatggacataattacccgtcagattggatccattcgtacatacgatcatcttggtatccggcgcaatcgcatcttcaatatccgccagattaaccgtacccctctcatccgctcttacgattgtaagcctgacgcctctgcgttccatttcatagagaggcctcagtactgaattatgctccatcatcgttgtaattacatgatccccaggctccaaaaggcctttaatcgctatgttaaggctctctgtagaattattcgtaaacacgatctgtctggcattttccccgccaaaaagccggcaaagcctgtccctggtatcatagatgagtctcgatgcactaagcgatgcctcgttagcgccacggcccgcattgcccatagaactcattgcctgtacgactgcatctatcacttcctgcggcttatgcatcgtcgtagccgcgttatccagatatatcataatcttccgtcctttcaaaaacaactcatccttataatttagtatagaccgaatccactatccagtctaattgttatgataaatatcaaataccggatatagaaaatatctatagccggtatctatcgccttcctatacctcatatacttctttcacaatttttatgaacctttcagccgaccgggacaactgataattcctgttgtacaccacattaatatctcttccctcgtctgctcctggaatcggaaatataagcatctgtccggcctttgcctcgtctgtcgcggcgagcctggatagaatagagactcctatcccctgccttacggacttcttgattgtctcctgattctcaatacttgctatgatttccagatctaccatattgactcctgccgaccgaagctgcttttcggcttcttttctggtaccggaaccttcttctcgcatgattacatgttctcttttcagccaggagatgtcattcggacattcctcctggaaccggcgatacttttccgtattaggggcaataatcaccagttcatccttataaaaagggatatacttgcagtgcttcttctccagcacagtccccgtaaaccccacatccgccatacagtctacaatctgggtcactacctgggcgctgtccgtctccttgatcttgaactgctcctccgggtacttttcattgaagcacatcagcaccttgggaagcaggtactgtgccgggatcgtagatgccgctattgtgatgcaatgcttgccgctgtccttcttcatcccgaaatgctcttcaatcttcccctgcagatctaccatctgcttggcgtatttatatagatccttcccattgtccgacaggcttacttccttggtattcctgacaaacagcctgacattcagttccttctcaagggaagagatatgcgcgctgatcgtaggctgggtcagatataattcccttgccgcctttgaaaaactgcctccctctgccacttgtacaaaggcctctaactgtttcagattcattagtatgctaccctttcactttccgctcccgttttcttagttactttgatgctgtccatgtattcgatgatcggcttggcgcttttcctgctggtatcaaacatatcgcgtacttgcgcgatcgtaataacgggttccccttttaaatgctcctgtatgagttcttttgcccgctccatgtattccgtcagagtatacatatcttccgtcaccttcactatcttctgttcctccagaaggatgttgaggatatcatctgccgtctctttcacggttcctttaaaatcaatctccgaataccggacaaaatcatatttcgcattggtaaatgtgtccaggaggattcctgacaccttgtcatagcgcgtgtctttctttacctgatattgcggcgtacacaagaactcatctactctcttcaggcatccctcctctatcagcatctccacaatcttgtcaaatacattcggcttgatcttctggaaataggtcatctggacttccgccttcttcatgccatacctgtaaggatatttctcttcatattctcttagcgccttatcaagagtctgcttcgcagcccttatggactcggcatgccatacataggtatccttcctcatggcaaatacctgcaccagcccttgacttaagagctcgcttatgtcttcttgcacttcgtcaatggacagcgcggtaagcttggcaagttccgccgtcgtgatcagcgtatccgcgcgctcccttacatgaagttcgataacatccgcagacgagccggattccttgcgctttaattcttctatgacattctcttggaaacgcttcttaacccctgggtttggctccaggatgacgcctcctccaatggtctccatcggagaataaaagcggaccacgaatttgtctccccgccttaccgcgatctcttcttccagcctgagctgcacgtagccactctcccctggaccgatctcctccttgtcaagaagcaccgcccggcataatatctcgctggttccggtaaagaaatgaagacgggtatgattggtcagcacgcgcatggaagactccagcacattgagcctgacatccagaagatctgtattcttcatactattcggaggcgccagcacgcaccctctcttgatctcgcgcttcttcacattcgacaggttgatggcaacccgctgtcctgcatagcactctttcctgtcctggccatgcacctggatgcttcttatcttgcattccttcccaatcggatacatttccagcagatcatccttggtaatggtccccgacaccaaagttcccgtaatgatcgtcccaaagccggacaatgtaaacgcgcggtcaattggaagtcttggtatagtgctaatatcttttgtcatcatctcatcgcttgtcatttggctgatggtatcgatcaggacttccaggccttccccggtggcagccgatacttttactaccggcgcatgttccagaaaggttccttccaattcttccttgacttcttcttctaccaattccatccattccccatccacaaggtcgcatttgttcaggacgatgatactcttctcaattcccagcagattcaggatatccatatgctccctggtctgtggcatgatgccttcgtccgcggcaatgaccagcagaaccatatccatacctaccacgcctgccaccatattattgatgaatctttcatggcccggaacatctatgatgccggcacggtctccgcttggcaggtcaaaataggtaaatcccagatcaatggtaattccccttctctgctcctcttcccaccggtccgtattcctcccggtcagcgccttgattaaagttgtctttccatggtcgatatggccggctgtaccaataataatattcttcataactccactcctaacgacctgcaatcaggctggtctcctccattatttccagttccttaaactgctctgcgatcagcttaaaataccggcgatcaatggtccgcatatccagaaggatggtatcattcaccgttcttggaatcaccggcaccggaagatggcgcatacgctcttccaattctgctacgctaatcttttccggccggatggttattgccatgctttctatccgctccagcgggagagaccccccaccgatctgggactggcatgaacacatctctatccttgcaggcaccttggcccgcttaagcatccctgccaggcttctcgccttctttgccacctcttccaaaggatccgtgatcatgcgcaggaccgggatattctgtattgccttctcttctgaaaggtattcttgaaggactaattccagggttgcagccgtgaacttatcaatccgcagcgcccgggtcaactggttcttcttcatcatatcaatgtactttttctttccgatgatgattcctgcctggggaccgccaagcagcttgtctccgctgaaacacaccacgtccgctcctttggcaacagactcctgtaccgtaggctcatgggtaataccatacttgccaagatccaccagcacgccgcttccaagatcctctatcaccggaagaccatgctccttagccaaaggaatcagttcatcaatccccaccgtatccgtgaatcccacaatccggtagttgctggtatgaacctttaaaagagccttggtctcttcggtaatggcttccttataatcatcaaaatgcgtcttgttggtggttccaacctccaccagcgtagccccgctttgctccatgacatccggaatcctgaattttccgccaatctccaccagttcgccccgggaaacgataacttctcccccttttgccagagaacttaggatcagcatgacgcttgctgcattgttgttaaccgccatggctgcctccgcgccagtaatcttgcacagaagtttctcaaaatgggagtatctctctccccttttgccctcttccagattatattccagattcgagtacccggtggcaatggctgccacccgcttcatatgctccggactgatcggcgcgcgtccaagattggtgtgaagaatcgtcccggtcccattgatcaccatgcgcatgtttggcgtatgcatggcagaaaccgtcattcctacatgctccgtaagatgatcgatcctgtatcttgcctgtgcttcctcatcgcattcgcctatatatctgcgtaacttgtccatctctacgtggatggcctccatcaccgtctcgcggctatagtgttcaatcattgcctggattgcctcatcttccagcagcacgtcaactttagggatgctgcggtacaacatgttcttgttcatcgttcatatttccttccatcatcgtaacatttttatttctataatcgggctggcgtctaaaacaggcggatcagcttatcgcttttggtggatactcttccgattacggatacctccgtatccattcctgcctgtgcaaaatctcgcatcatatcctgaacgctggcggatggaacactgatcagcagccctcctgaggtctgcggatcatagagcagatccagatagtgttcctctacagagcccgtctctacctttccaatggaataccctttgtttttataggttccggcaggcaccaatcccatcttcgcatagtctatcgcatctgcaaaatatgccacgtccctcacctgtatctcgaaggtcacatcgctggccgaagccatctccacacagtgtcccagcagtccaaatcccgtaatatccgtacacgctgacacatcatacttttctactacctgttttgccttcttattcagggatgccatgaccctctcggcttcttctatcgctgacgcagatgccatctctgccttgatggcagtattgactaccccactcccaatctgcttggttagcagcagggcatctcccggcctgcatccaaaattcttgaatatcttatccggatgcacgaacccggacacgcatagcccatattttggctcgtcatcctgtaccgaatggccgcctacaaggactgctccggcttcttttaccttatccgcgccccctgccagaatatctcccagtatggacggatccagacaattgggaaagcctacaatattgagggctaccgccggctcgccgcccatagcccagacatcgctgagcgagttggctgccgcaatctgtccgaacatatagggatcatccacgatcggagtaaagaagtccaccgtctggatcatggcaatctcatccgtaatcttatagatagccgcgtcatcggaggtctcaatccccacgatcaaattatcatcatggaattttggcagcttgcccagaacctgggcaagggtctcgggaccaatcttagctgctcatccggatgtcttgctaagtgtagtcagtctgacatctgatttcatctttttttcatcctccttgcgtcgttttcatctttttacagcaaaggaggccagccacctgctatcacaggagcccggccctcctcaattcatcttcttgcacccatctgctacggcttgataatcttgcctgcgcctgccagcgtctcgacaatgctgtacatgttggtaacagagccaactgccagcttgtccttcagcccgtaatagtccaggcaggttccgcaagtaagaatctctactccctgcgcttccaaagacttaagatcctccagggaatctgagccttccgtcgtcagcgtagcgccgccgttatagaacagcatcgtctttggcagttcatccagctgcgtcaccgcaaagataaatcctttgatcaacacttttcctaactcatcatttccagatcccatacggtcggaagatactgctactaccatatttcctttccggtcaggaatacatgccggatcctcctgggatgcggcttccatagcgccattcatccggattacaaccttgaattctttgtctcccagtttttccgaggatacttctccgcctgcgcttgctgccatctttgtcacattctgcactgcaatctcattgtcgaccagcacttctatcacttccggccctgtaagcgcctgcattgcctttttggtcttaataaccgggatcgggcaattatctcccattgcgttgactgtaatcataatattccgcctttctttttctgttttcttaccttcaacacttatagatacattctatcattgaaagcgtaaaaggtaaatggtattttagatttttgttgctcttttagttccaatacatggtatttccctcccgcgtaatatgcgggcttcatctgcccttttctgaacgcgtcaagaaacccttccatcgtatgaaacttttcagggaagtaagttgcacatacgcccaccttctccggcacgtggcaatcgctggagcccaatgtgaaaaggcccagttccgcagcgtacctcgcggccttctggcatgcctccacagaagtgcttccgttcagcacctccagtccatgaaggccctttaccttgcgcagattctcctcaaggccccggttgttattgcggaaaggatgcgccgcaaagcacacgcctgcctgggcgtttaccagatcaataaagtcctgggccgggattctctctgtgggataatcttcgattccgaacgccacaatatctccttgcagggaatagtattcaatcccgacaaagattgggaatcctgtatctttggaatattctgccgcatactccttaagccccatgctgtcatgatctgtgatgcagattccctcaagtcccttcatacgggcaatctgtaccatttgatcgagagcaaggaaactgtctttggaatatgtcatttcatgcatatgcgtatctataaacatggcctgttctccttctcttaattcccattatataaacccaggcccccggcttcaaatagagtttttttatatgtttccacttatatagattccgtctataagtttaatttgaacgaaaataaatctgggacagagcatagaattccccgtcccagattcaaatatcttgttttccattagagccttttttcgaaattgccgtctacatggcatccttctgtaaatatcataaaagcattggggtctatgctatggacgatctgcttgatctgtcccacctcgtacttggatatcattacaaataaaatataggaagtcttattggtgtaggcgccttccccgtcccagttggtgacgccccggcccgtctgctcaataatggccctggagatgcccatcttcttggtaaatatcatgacgctggtattaatattctgaatatgtactctatcaatagccatggcaagcacggtagtataaatcaatgaatagataacaatctctatattaaataagaacagacagattgcatagacgaatatattcatcagtatattaatcttgcctacgctgatattcggatacttcttagagcagcaaagccctataatatcctgaccgcctccggaacttcttcctcttagcacaagccccgttccggttcccgcaatgattccgccaatgatgcaggctgtcaggtaatcctcgatcagcggcacggccggaatcggcacgactacaaggaacacactctggatgcctacagtaatgaacgtcttaatcgcgaattccttccccagtatcttcagtcccatatagaacaaaggaatattgatgataaagtataagataccggaaagatccacgcccgatggcaccggcacatgcagcacgcttaccacgaatgtacgcatgagctgggcaatacccatgaaccctccattatataatccaagcggtataattattaagtttactcccaaagcgaacataaggctgccacccaccgcataagccgcctgcataatcaattgcttcttttttgcgtctaacttctctgccatctccgtatcccattccccttgaataaacattcattaaaagccttccatcattctagcatctgctatctggatttacaatgataatctaaaatataacaaaaaagattttaaaaaaacctgaggggttacctcaggtcaggcagcacattatattcctggctgttcctatgtttggttgtactagtctttaactcttcgtgtttttccaggcaatcctggattgcctcattcagggacagcatcttctcatctaatgtagataccatctctgcacactctcttaattccctgctgatatattccggcgcatttccttcaaacttatagtagatcttatgttccagactggcccaaaagtccatggctatggtacgtatctgtatctccactttcgtatccaccacgctgtccgataagaagatcggcacggataccagcatgtgataactcttatagccgctttcctttggattcttgatataatccttgatggacagcaccttaagatcgctctggttgccgatcatctccgccagcctatagatatcggatgtgaaggagcagattaaacgtacgccggcaatgtcattgacatacttaaccatgttctcgatcgatatctcataaccatactttctcagtttcttgacaatactttctgccgtctttactcttgtcttaatatgttcaatcggattgtactgatgtacatgctggaattcgtcatttaatatctcgagcttggttcccacttcctttagcgcggaagtatacaggaacataaccgtcttccagctgtccacatcctcatagttcttaatagcattctccataatcaaataggtctctcctctcttaccgaagagttaattccgtactgttacagtatatcatataggacatggcattgtcatgaaattcacacttatttaagaaagagattatatttcgataattagaactcaattccttcccgcgccagttttcccagatcataaggatgcttaatcttatgcatctctgtggcgtaatccgcgatttctttcatgcggtcagatgcctgatgcccggtaagcacgatctccagcccccgcggcttatgcttaaggaagctgatcaacttctcctcgctcaatacctttagtccgaccgcgcacagggcctcgtccataaccagcagatcaaacgggctgcagaacttgacgatctcatccagcgccttattgttgtaatgcagaagttctgccttctcatccccgttcatgcgacttacaaacttcacctgctctcttccgggcagacaggtaatattcgaaatctgttccagtatcttccgctcgttagaaaaattgtccttcaagaactggaaaaacagcactcgaaatccatacccggctgctctcaccgcctgtcctacggcagccgtggtctttcccttcccgtctccaaaatatatatgtattctccctgtatccatcatactctacatacccgcctccatctgtagtctcatcctttggtctttgtatgttcccctgccccagtcaaaaatgggacagcaagagttatctcttactgcccattataatatttccacggaagattgtatagtaattcttaaaactccagcttcatgtcgccgaatttaatccactgcttcttgcgcatgaactcggagatgccaagggtaacgactgccggcaggataatctggatcagcagtatcttgatcagaaccaccatcccaggctctgtctgtatcatcgtctgccaagtcatgatctgccccaccagtcccgctgtacccatgccggaacctgtggcattgctggtcatatgtagtaccatggtacccactggccccagtatggcgcttgataatatggctggcagccagattacaggcttccttacaatgttcggaacctgcagcatggatgtgccgattccctgcgccagaaggcctccgatcttattctccctgtagcttgccacggcgaacccgaccatattgcagcagcatcccacggtcgctgccccggccgcaagtccggatagattcaggatgattccaagcgccgcggaactgatcggcagagtcaggatcattcccatcaatacggatacgatgattcccatcaggaaaggctgctgttttgtgccccagttaatcagagagcccagccatgccatgaatcctgagattggaggcccaagcagcagacccactgccgcccctgatccaatcgctacaatcggcgtgaccaggatatccaccttcgtcttgcccgctaccagatgtccgaagaatatacccacataggctgcgataaatgccccaaggggctctcccgggccagcatataccatggttccctctaccaggaccgtgccggacagaagattgccggcaaatgcgccggccattccggcagttgccgccgataccacgaccagcggcggttctttgaacttgtaggccaccgctacgccgatgccagctcctgtcagggaggccgcagccttcccgatcacatagatcatctctcccacagagccgccaagcagcgttcccacctgctggatgatcgtgccaatgatcagagtggcaaataacccttgcgccatcgcacttaatccctcaataaaaatccggtctagtgctttttttaacttttccatcttccctctccttacagtttacatacaattttacaactgtcttgtcatttgaaaaagtttatcatattcctcacgttaaatcaagcagtgtcgattatttcttcctgttccacttcatggttccttaagattatttatgattagataatgatatcttcattttttctttagtgcagtgtcacacaatggacacatttaacttatatactgtaaacatcaaaagaaagacgttaacttagttttatatagattgtttttttcattccctttcctcaagatgcggcgtaaaacccgcatctttttccttttaatgctttacagcgcattccaaaatggatatacttttaggtattcattaactaaagcgaggtatgcatatgttccgattatggggaaaagaatttaaagacaacagaatgcttcgggataccgtcatctgcgatgataccgaggacacccgcacgcataaaatattcaacgcgctggatgccatctgctatgaatttgatttgagcaagcccatctggctggattccaccatcgaagaatttaaaaaacatgataaggcaaggtttacgcaggataattttgtggattccattgattttgattacctggaaatccatgttattgaggagtaaggggaattccccttactcgctccgtatcgctgccagagggctcagcctcattgcccttagcgccgggaagtatcccgcggccacaccaaccagcattgcgaatcccatggacaggattaccagccaccaggggatgtacgagatatttccgtcaatgcccattgccgctccgttgccagtcaggaaattgatgacaaaggaaatcaggaaacttaggatatttccgatgatacccccgatcaggcctatgaatgctgcttccaccaggaacatttgcttgatgttcttcaggctgcagcccagtactttgatgacgccgatctctttggtccgttcatagatggacatcatcatcgtattggcaataccgattgccgcaaccagaagggagactgctccaattcctccgagcacggcctggacaatggcaaactgacctttcatgctgtcaagatattcggcgttggtctccacattgtagcccatctcccggacgatactggcgacactgtccacattgtctatgtcatccacttttaactgtgcataagagtagcagaattccttgtatggcttgccggacttcgtcgtcggctgcccggggatcacccttgcgttaaactcttttttcagtatctgcttcaaggtatccagatcgcagaatatgttatagtaattggcattgtattcatccgggccacctgccacgattccgcttgcctttgccacatgctttgctatggccttgggctgggcctgcttcccatcgccgctgtccgaattgccggaggcttcatcgccgttctggctgctctggttataatacccttcttgatccaggatcaggaatacggaatctttcgccagatcgatatccggcagtcttccggtctcatagtatcctttacctgaccctttctcattgaacatggtcaggactccattgccgtataccaggttcagatgcccggaattgggcttgggcagggagccttccgccagattgatattccttgcctccatggcttccggcgttgtagccaggagctgtccatagccttcataaccgcccttcagcagtaccaccggcagttcatataccggagaggccaaggctacatgttccagtttggacagcctggccagcagctgatcattaatatatttggttgactgctcttcttcctttcctgaggaggaatacatcatagagttgcctgcctgcgcgccgcttaccttaatggtagtcaggccgcctgactgctctacctcgcggtacagggactgctgcatgccaagtcccaatgatatcatgacgacaatggatgccgtgccgatgaccactccgaggacggtcaggaaagtacggagtttgcgccgtttcaggttgctagtgctcatcctcagaaggtccatccaattcatccagcaatccctcctcttcatttaacatctgctttttcttcttttttctgatgataacgactgccacgacaatccccacaatgatgactacagcgattgcgatcggcactaccgggactttgccttgctcttcttgcgggatttccatcatcgcggcatcgtccgcgctcatctctgtcacttccaactgaagatctttggtggttgtggagacttttccggcctcatcttcgtaactcagcgtcatcgtgacctttgccggtccctttgttgccttcttgccttccagcatcgcgtctatggatgccgccgcgccggattctacatttcctacaaacacttcttccttcttaatgccagccccttcaaaggtagccttcacattatatagtttgatgcgtcccagattatagaggctgcaggaaacatttccttcttctcccaccgcaatggcctccgggcttatatcaaagtcgctgaactcaaaccttgcatcctgcttgacaggaatcgagatgctggaatccgcctctatctgagcagcattggcgtcttcatacttcatgcccatgtcgatgctgtacggcttctgaagcaggtctgccttggcattgagctggatggatatatccgccgttccattggccgcgattccgtccagataaatagagctcgcaccggatgtaggaaggaatgcgggagccatagtctgctcatcctttccttccgtcggagcgttcagattgaacagcatattgctgactctggtggacttggaagtattcttcagatggatagtcagtgtgaagtcgcttccggcgcgcacctccgcaggatccgtggtgaagcctgtgacaatgacccttgggacagacccggagccttccgagccgccaccgctaaaagatgccccgccgttgctgaatcctcctgcttcgatgccctcatctcctccggcgtagacagcctgcggctggtcagaaccgccgccaggcgtgctgtccttcttttcttccggcttcgctgtcgtattcacgtaaaaattctgggttactttagcctcctgatcatcaccgatatatcctttaaaaaccagcgtatatctggcggtaggaacatcttctctctgggtaaattcaaatgccacttcctcctgtgagttggccggtagcatgctgatggtttcgcggtaactttggaaatccgtctgaaacggccatgcatccccggtatctcccagttctggcgctattactacattttccatagcattgtcggtattattggaaatcaccagtgtccacttctgggcttttcctgcctggtatacaggcaccttgttgtccttggatgcaatggacagttccggcactgccgcctccgccttctgggccggcatcgccgatactgccaccaggaccgcaataaatactcctgatagtatctgttttaattttttcatattttatatatcctccctcaatattttttccaggttctcctctatcttaaggatctttccatcccggatgtggaagatcctgtctgcataagccgccagatgctggtcatgggttaccatgaccagcgtcttcttctgctctcttaccaccttctgcatcagttccatcacttcctccgaagtgtgggaatccaggttcccggttggctcatcggcaaatatgatcttcgggtctaccaccagcgcccttgctacgcctaccctctgctgctgcccgccggacatctggttgggcaggtgcttcttatgcttttttaagttgaccagatccagcatcttatcagccttcttcaatcggatatcctttggaatcccgcggaagcttagaggcagcgccacattctccaccgcgttcatggttcccagcaggtggaaggactggaagatgaaccctacatgatcgcggcggaaccgcaccagctggtcctcgttcaatgtctcgatatgctgccctgcaattactacgcttccctttgtgggcttctcaaggcctgccagcatattcagcagggtagacttgcctgaaccggacgttccaacgatggcgcagaattcgccctcgcagatatcgaaattaaccccatcaagcgcccggacaatctcatcccctactcggtataacttatacagatctctcacttctattacttttcccataagtccctcctgtcatatgtgttctaagtatacaatagaaatagaaatactttcgatagaaattatgaaatatttcttaatattgcattttcgtaaaaaaagtattataatatgttttgtgcagatgtagttcatcggtagaataccagcttcccaagctggggaggcgggttcgattcccgtcatctgctcttttccaggctgggaatacaattgttgtgtattcttagcctttcttaatacgatagcctatgaaggagcggacatgataccaaccatcggattatccataaaagcattaaaaaaagagcctttttcaggctctcactgcggcatgagatattatcttaacgtgttagacgatatgctgtatgcatacatctattctgaaccctggtgttttgaggcaaccccggatgaccagaaggagcagaaagaatttccgtttacccaggaaggcctggatgcggcaatggactggctcaatgcagtctacgaagaaagacgcctccaattcaataaggcggaaaaagacaagatgaagcatttccttggaaggtaataagagcgccggcatacaccggcgctcttattatgcaacactttccagcacctcttccgcaatattgcgggcatggtctgatatacgctccaggcacaccagggtatccagaaatacgatccccgcctccgtattgcactggttgttcgtcaggcgcttaatgtgcctgcttcgaagcgtgatctccagattgtctgcctgggtctctttctcaatcaccttcaaagccttttccctgctcttctcttcaaaggcttccaaggcatatttataactgtcaatacatacatccagcatttctcttaactgggaacttccgatttctgagaatgccaccttcttttcatagagcgtctccgcaaattcggagatattttcacagtaatcgctgatacgttctatatccgacaccatctgaagaaggtgtgccaaatcttgatgctccttctcgctgatctggagagaacttaacttgatcgcatagtcggtaatgcccgcgctaagcttatccaccgtagtctcttcttccttcaggaactggatatcctcatccttgagcgtaaagagaaccgtcttggcaacgtccagagaatcctttacgatctcgcccatacgagccacttctctgactgtagactgaagagcgatgcttggtgtctccaggatacggtcgtccaatagcaccttgctcttgtcctgggtatcctcctccacgcgcccgatcttcttggccagcttgataatccagctggataccgggaagagaagcaccgtcgtgccaatattaaatgccgtatgcacaatactgatttctgtctgcgtgatgatgccaacgcctgcctctggatggaggacttcaaaatagacgatggcgattacgctgaatataatcgtaccaatgatgttaaatagcagatgcatcagcgctgctgtcttagcattcttcttcgcgccaagacttgacaggattgcggtgatacaggtaccgatattctgtcccatgataatgtagatagcggcgctgaatggaaccagccctgccgccgccagactctgcaggatacccacggaagccgaggaactctgaatgatcgccgtcacaagggcgcctgccaggattccaagaagcgggttatttcccaacgtaacgaagatactgcggaatccttcggattcttgcagcggcgctactgctgatgacatagatgtaataccaataaataacaagccaaagcccacgacgatgctggcaatctctttggatgagcgtcttttcccggtcagcatgatgatcacgcccagcatgaccgcaatcggagccagagtggtcgggcttaggaacttggcccactcgacagaagataccagccaacctgtcaccgtggtacctacattcgctcccataataacgcccatagcctgggtcagattcataattcctgcatttacaaatcccacgaccatgaccgtggtggctgatgaactctggatgaccgcggtaatcgcagctccaagcagcactcccatcagcttattcttcgtcagcacttccagcagggacttcatcttattgcctgccgcattctcaaggccctgagccatgatctgcataccatagatgaacattccaagtccacctacgaaaggtatgatgatgtttaagtaattcattggtttcctcctaatgtacaaataaactcactatttctacaataccattaacaaatagagaaaacaacaagtttttttactttttcatcttaggatcaaataccatggatgccaggtaaccgaatatcagtgccgccgagatcccaaccgcgctggccttaaagccgcccaggaagattccgatgaatccttctttatctaccgcttctttgacacctttccataaaagattcccaaaccccgtaagcggaacgcttgcccctgccccggcgaagtcctggaaaggctggtacagctgcaaggctcccagaacggctccgccgcacaccaaaagcaccatgatgcgccccggcatcagtttcgtccgatccagcaggatctgcaccagagcgcagatcaatcctccgatcaaaaatgcttttaaataatccatatttttctccttcctgctagcaatgttccagcacgattccatgggcgattcccggcacgctggcaccttcgttgaaactgacggtggacatcagcgctcccgtggggacaaaaagaatccgcttccattcccccttgatcagtttcggaaggatataagctgacagcgttgtggccgcgcacccgcatccgcttccccctgcgtgggtgtcctgcgtctgctggtcaaagatggtcatgccgcagtccatatggttcttcttaatgtcataccctctgcccctcatcagatcgaacagaatactctgacctacatatcccagatccccggtaataatacggctgtaatcttccgccgcgtatccaaagtcttccaggttctggatgatggtgttgcaggctgctggcgccatacaggctcccatattctgggaatccttaagcccatagtccacaatcttgccgatggtgactcccgttatcctcacgtggcttcgctttttcccaagtatgaaggccccgcttccggtcaccgtccactgtgcggacagaggcctctggttcgcgtatccaagcggaaaacggaattccttctccgcgcttccaaaatggctggaagtgactgccatcatataatctccatagtttcctgcaacgctcatggaggcaagcgccagagcctcccctgccgtagagcatgccccaaacaggccaaacatagggattcccagcccctctactccgatcgacgtggcaattccctgtcgcagcaagtctccgccaaagagatatctgatgtccgcaggctccagatgctccttccccatagccagcaggcaagcctccttctgcatggtgctctctgccgcttcccaggtatcctccccaaagagatcttcgctctccaccatatcgaacatcttgcccagaggtccttccccctccttttttcctaccacggatgcgctgctgatcagaaatggagactcctcgaattgaatgctttgctgtccttttatcatattaaaataccccgcttatcttcaatatccagtagccaagccccagtagccagctggtaaatatcccatacaggatgaccgggcctgcaatggtaaagatcttgcagccaatgcccatgacctgtccttctttcttgtattcgatcgccggagcggccacagagttggcgaatccggtaatgggtaccagcgcgccggcgcctccccattttgcaatgcctgggtagatgttaaaccctgtcagaaggacgcttaaaagaaccagtatcatggaggtccaccctccgctgatatccttatcgagtcctgatttctcgcagacatccaagattgcctgtccaatcacgcagatggctccgccggtcacaaacgccttcgccatattggccggaagattgtgaaccggcgtcttccgttttacataattttcgtatgcttgctgctgtctttgcttgtccaatttcgtttcctccataatcatttaattcctaccaccggttgaagaagaatatgaatgccccgattccttttcccagcgctattcccaatataatatagggaatgcagcgaagcagcttgatcctgcggataaagatcgggaacagattcaatatctctgccagcgccatggaccagcaccccacgaagattcccccgaacaggccgaagattggcacaagccacccgccgtggggaatcgagatctgatagataaagaatatgttgcccagaattcctcccagggccacgctgtcttcatacagaaggatatgctctccggtatgagtcctgtccgcaaagtcggatactacgcccaggccgatcacaaaggaaaacaatccccctgctaccgccacgccggcgctaagaccgatgattgccagtagtatttgtgctgcccacatccagttctttctcctttctggaatatgtctctatcagggtcgtctggatatcattctcatataaacgcatttccacctccataggcgttggatctaccgtaaacttcttttttccaaaatgattgaaaaatgtcagaattcctatgataagtccaatgcagtaagtcagttccagaatcgtaaatccgctgttcgtcttaccagtgaccagttcatagatctgcgagaacatcttggtcgtcccgacgtcgttgttgaacgccataatggagaatgccgctccgataaaactgatgattaccacgcccaccaccttcatcaggtgcacggcgcctccggcagtctgctgctcctcataggtaacgataaagtccgcttctcccatgttctggacatccatatttggaaactgctgatggatgcattcgattaccttcaggatggacaccgtagttcggttctggtgcttcttatccgtatgatggaactttaaaagcttgatcgtattcagtttgggaactacagacggattcgcgcattccatggtcactacatcgccaagggttacttccgccttggtgacctctacatttctgtccgcctttatatatacggtttcgctgtttgccgccataattaccccctgctttccatactggctgtcacgagcgtgccttcacttacatgattcctgctcttgacatcgccgaaataatagataaatcctatgatgatcgcagccgctacgacgcaaatcaggcacaccctgagttttttccttgcctcatccatactttccaccttctttattccttttgtgggttagtatggatggtttcgggaaaaatatacatggcgcgcctgtcatattcgttctctgagattttttaaaattttcttttccatcctggatacctggacctgggatatgcccagttccctgcctacctgggtctgggtctggttggcaaaatagcggagatagatcagctgcctctcgtctttatccagataattcagcaattgctgaagcagcatatgattaaggatcttgtcctccccgccttccttctccggcagtttatccatcaggcggatctcctgtccttccttctggtagatcggcttatgaagggactcaatatcgccgctggcatccaatgccatggttagctcctcgcgctcaacattgaggctctcagctatctcggtaatcgtagggtctctgccccactgctcctgcagcctttcctggcacagatatgccttgtatgccagttctttcagcgaacggctgaccttgatcatcccgtcgtctctcagaaagcgcttgatctccccggatatcatcgggacggcatacgtggaaaacttcacatcgtaagacatgtcaaacttgtctatggcctttagaagtccgatgttccctacctggaacaaatcttctgcctctacgcccctgttatagaatctttttacaatgcaccatacaaggcctgcattttcctccactaatcgtgctcttgcttcttcatccccgtcgtgagacttctgaattaaagcgattgtgtggtccatagtctacgtccttttccaattgttttttccatctttaccgttgttcctttgcccgggactgattcaacttccagtttatccataaaggcttccatgaaagagaatcccattcccgaccgctccaattccggcttcgtggtaaaaagcggctccatggcctgcttgacatcctcgattcccttcccttcatcttctatttcaagataaagggtcttgccttctgtacggcagcggatatagatgttatgtacctcgctctcatatccatggatgatggcgttggtcaccgcctccgataccgccgtctttacatccgacacttcttccaccgtggggttaagggatgtcataaaggctgccaccgtcacccgggcaaaggattcattggatgagcggctgtcaaatattaactgcatttcattggtattctccatctacttctcctcctcatatatctgcataatttttgtgacaccagacatggtcaatatcttcttcattctttcatttgcgtgcaccgcgcacacctctcctcccagcatatagattcttttatagcgccccataatcactccgattcctgaactgtccataaaatttgtttccgcaaaatcaaagatgacatagcggatgtggttgcgctcaatcagatggtccgactcctttctgatctcttccgcattgtggtgatccagctcatgtggaagaaataccgtcagacaattctcctgtacctgatacttcatattcatcctcctttttattttgtccattcgacgcaaaaaggatatgcaatcccagattgcatatccttctctttcgtatcgtagttattattctcctgtatcgctttgtccatcgtcctgcccgccatcctgcgctttgccggaattctgggcatccagcgcctgctgggcggcctcggccgcattcgttgacggataagactctataatcttctggtatttgacgtttgcctggtcctggtctccttttttctcataagactgtgccagaagcagcatggccgccccgtcattatatccctcgtccatcttcataacctgctccaggttcgttatggctgaatcatagttagctacttcaaagttctgctgcgccgttgcaaacaggttcgtgcacatccgcgggtataagtctccggtaatctcctcgaattgctctctccccacggttcccagggaatccggattcactttcagaagttcctccagcatggctgcatcgctcatatcgttcttgttgacatgggcgctgatgttcatgacgatctcgtaactctcctgcgtggaggctgcagtggcctgggcgctctgcgtctcctcgctggtggagcgatagtcttccagttccttcttaagggcactgatctgtgccttctgcgtggcgatctgatcgctgaattccacggtctggcggttaatcttatcctgcctggaagccgtgatcgccggcatgatcagaaaccacatgactgccacgcctaccaccagcccgattgctatattgacgatcgtatgaagccctgcgttatccttgtaactggaggataccggctggatgatcgtctcatttcctatattataggtaaccgtctgctgctcttttccttctttttctttgatcttggctgtccttgacttgcgtacctgattcagttcgtgcatatagcgcagcgtaatctcgtccgtcttatccagtttatgggcgatcctaatggattggcgggccttggaatactgttccgtatccagatagatcagggtcagaagctgataggccttcacaaagttggggtggatcgccaccgccttcttcagctggatcacagccagatcctcgccgccctgctggcagtagccgagagcctggttaaaccgtttgactgcctggttgatcgcctccaattcaccctgggtctccttaaccttctgaatatagtaattcgctatattttcatgggactggaaattcttgctcagaatccattccaccagcgcctctatcacatcgcctctgccgtaatagacgagtccaagcagattcctggcagctatattagccctattatattgtaagctgcgcttaagcgatgcgatcgctcccgacagatcccggatattggccttcttcaatccatcgttataccagtagttcgactggtacgccagttttgttgtataatccatatacttccctctgtactcttctacttggtttgttcaatcatctctcgtaaaatgtccgtcatatccgtcaagtcttcctgatagacagcatcctctatatcttccacttccaggctcggctggaatttcttcaattcttcttcaaaattaagcatggtaaccgcctcctgccagtaacttctttaccattcctgcaaggtacaacgagccaagacaaaagatgtcgccatcatccacccgctcattttccgctttttgtaaggcttctttcaggcttccggctctatacaccttcttcctggtatatttcttaaatactcgctccagttcttctgccggaacccttctcttatcttcgatctccgtgacgatataagccttggcattcatattcctgcacaggtattctatcatctgctcatatttcttatccgacacggccgaaaagatgatgaccgggccttctccctcatccgcgccaagcgcctttacgctttctgcgaatgcctccacggctcccggattatgcgcgccatcgatgacaagatgcggggctacccgctccatcctgccttcccagtgcatagatccgatcgcgtctacccagcgactcttatggatcgtctcatccctaaggagatactcggcggcctccaatgcgatctgggcattcatgacctgataacatccacagatcggcacttggtagataacacctttatcatacgcatttgcccgggaaaatgcaatatatttccagttaacttctcggatttcgtacgcatttttcgagatttctctacagggcgcaagcatcttttccgctgttttccggatgaccgcgcaggctttctgattgctcgcatcgaaaaaaaccgggacgcccggcttaatgatcccggccttttccgccgcgatctcttcgatcgaatctcccaggatatcggtgtgatccaggcttatggacgtaatcaccgcaagcgcgggatgctcgatataattggtggcatccagccttccgccgatgccagtctccaggatgatatattccacatccgaccccgcaaatgccgtcatccccatgccaaggaggaattcgaaataagagggatgccccaattcctcttcttccatcttccttgccgtttcctgcacctggttaaatgcttcaagaaacgcctcattgtctatctgtatattgtccatgcgaatccgctcattgatggataccagatgaggagaggtaaagaatccggtgtgctttccttccgccatcaggatggcctgaagatatgcgcacaccgatccttttccattagtccctgccacatggacgatcttgcggtcagaagaaggatttccaagccttcttaagaactccctgacatgatccagggtatgcttcttcgtaaacttgggaagttcctctatatatgccactgcctcatcatatgtgaatcctactgccgtcatcttactcgtctccatccgtctgctctacccaggacttagtcttatcggttgcagttccttcctggcagatcaactggccatcctggtaaatatattcgtcggatgaccggaagatggtattgcttgagcctacctgactgaccacgattacatctccgttgatcagttctgtctccgaaaggtcaattcttgtattattcaagaaactgctcttttgcttttctccgtttacatagactttgctggactttgtaaagttctctccatacaggctatagccgccatccagatgtggcaccacgttcttcagcgatacatccttgatgcccatcaccatatggccttccgttattggcagcttgccgtcgtatacatactgctttccatacaggatgtcatactgcagaagttccaggtctgccagataattcttggtctttcttctctcctggtgataattgaataccgttccggaatgaatatccaggcgatcaaatacatccgccataatctggtaggatggaacattgcggtcttctttcggaagcccgatgttatcccagattacataatttgtgttgtaaagataacgccccttcaggtcttctgccttcagtcccatggtaggaagatggtctccgtagaatacgatgacggagggctctcccctgtcttctacggctttcacaagattccccgcgaactggtccatctcatagacttggttcacatagtactcccacttgttcttcgtcgcttcgtcctggattccttccacctggatggccggattttcaagcaccttttcttccggatagtcgccatgaccctgcacgctgacggcgaagacaaagtcttttccatccgtggtattcatagaatccatcacgtgctgcaccagaatatcatccttggcccatccattctcggtggtctgcaggatattcataaactccttgctggtaaaactgtcgaaaccaatattattaaatactcttgccctgctgtagaagtttcctccgttattatggagcgcgtgtgttccatacccaagcgccgccagagcagtcgccgcgctctcactagtctgatccttaaggaccgtcttgtagggatattctccaggcccgaaatacctcagattcatgcctgtcagcacttcaaattctgtgtttgccgtgccagctcctacggatggcactttaaagtaaccggacgaataattcttgtacatctcatgcaggtttggacatgcatcctgggaagtagtgaagaattcagcttcatccacgtcaaagtaggactccagctgaacgaagatgatgttcggaagttcttcttccgtccgccccgtctcattcttggtgatctctccgttattgctgatcttggcgatcgtctccttgctgtagtcgttcggttccgtaatacctgtattaaaaaggcttgccataaagcagtacggaagtccatagtcttcataggcgaatgcaatattgccaaaataggtggatactacccgcttctccactgccaggtcggatgcaaagccatatgccacgaagcacacgacgatgcccaccagggcccatacgcggcgtatctttccctcatactggcctccccgcttccacatggagatcacccatatgatgacggagacgataccgataatcaggacggtcagttcaaatccattaaagtagttattgatcagggtaagcccgtctttcgctaccttaagatcctgcgcgttaaaaggcgtaacccgcttcataagcatatatccgtttgccacgcccagaaccatccacagcacgctgataatgatgcgcacgaatacccttcgcttgaacagatagacgatggaaaatgtgatgaatatcataaaagcattgtacaaaaacaccattggcgtccctgtcatataatcccaggcttcgaataccgaatgtctggatatggcttctatggcaaaattaatgatacatgccagcagcgcatggaacaccagggaaaaccggttcatgaatgcatagaccggcttcatcttcctggcaaaggcgctgttgcggcgttcctctataatccgggcccgccgctctctacctgccttccatgctgccttcacatcttctgtcttcagatttttcagtttatgaaacgccccttttatatcaggcttcttaatatggattttcttcataatatccccttatgactattttgcttttagccctgcaagcctttctttgacttgctccatcatctgtttatatgtctcgagcttgtcgcgttcctcctgaacttttgcctccggcgccttgcttacgaatcgttcattgttcagcattccggatgcacgggcaatctctttttcaagccttgcctcttccttgctcagccgctcgatctcctgctctaaatcaatcaattcttccaatggcagataaacggttgcgtccggtactacgatagatacggcatcttccgcgatgccggccttatcatgctggatgatcagatcgttgacgaatgccatggactgggcagaatttcttaaatattccagtcccgtgcagagtttttgatcctcgcataccaaataggcggtaaccttcctggagtttggcacattcatcttagcgcgcacgttccggattccccggattatctctttgtaatgctctacaatattttccgcgatcggataattccacttctcatcatacttcggccattcggacatcataagagactcttcttccggcaccagcttgccatagatctcttctgatacgaacggcatatatggatgcagaagctttaaagacttcttcagcacttcccgcagcgtccacatcgcgtcattggctgacttctggtcttcctcaacgtgataaatgcggtatttggcaatctcgatataccagtcgcagaattcatcccacataaaatcatagatcttagacagcgcaatccccagttcgtacttatccatattctcggttacgtcttttaccaggttattgcacttggacatgatccagcggtctgccgggcgtaatttgaaatctgccggctccgtgatctccttatcttctatattcatcataatgaaacgggacgcattccataccttgttggcaaagttccggctcgcctccaccctttcattgtaaaaacgcatgtcattgcccggcgcgtttccggtgatcaaagtcatacgaagggcatccgcgccgtactgctcgattatctccagcggatcgatgccgttgcccaatgacttgctcatcttgcggccctgagagtctcttaccaggccgtggatgaacacggtatggaacggagttttcccggtatgggcatatccggagaataccatacggattacccagaagaagatgatatcgtatccggttaccagaacatccgtaggatagaagtaatccaaatcctcggtcttctctggccatcccaatgttgagaacggccacagcgcagaactgaaccaggtatccagggtatcctcgtcctgggtgaaatgcgtgcatccgcacttcgggcatttctccggcacgtcgcgggatacgacaatatcgccgcactcatcgcagtagtaggccggaatcctgtgcccccaccagatctgcctggagatgcaccagtcacggatattctcaagccaatgcagatagatcttgtcaaaacgctccggcacaaacttaaggtcgccattcttgaccgcctcgatggccggcttcgcaagttcttccatccttacgaaccactgctgcttaaccataggctccaccgtcgtatggcagcggtcatggatacctacattatgagaatgcggaactacctttaccaggtatccctgctcctccagatccttaaccattacctttcttgcttcataacgttccattcctgcgtacttgccgccattttcattgatggtggcatcgtcattcatcacattgatctccggaaggttatggcgcttgcccacctcgaagtcgttagggtcatgagccggcgtaatcttaaccgcgcctgtaccaaattccttgtctacataataatccgctacgatcggaatctcccggttcaccagcggaaggattgccttcttgcctaccaggtctttgtaacgttcatcatccggatgtaccgcgatcgcggtatcgcccagcatcgtctcgggacgggtggtggctatttccagacaggcatcgctgcctacgataggatacttaatgtgccagaagtttccgtcctgctcttcatgctctacctccgcatccgagagagaagtcttgcacaccggacaccagttgatgattctggatcctctgtaaatatatccttcttcgtaaagtttgatgaacacttcctctactgccttggagcatccctcatccatggtaaagcgctctctgtcccagtcgcaggatacgcctaatttcttaagctgatcctcgatcgttcctgcatattcctctttccactgccaggtccgctccagaaacttctcgcgtcccagttccttcttatcgataccttcttctttcaactggttggtaacctttacttctgtagagatcgccgcatggtctgttccaggaacccacagcgcgttgtatccctgcatcctcttataacggatcaggatatcctgcagcgtattgtcaagcgcgtggcccatatgcagcttgccggtaatattcggcggcggcatcaccgtagtaaacggcttcctgctcctgtccacctcggcatggaaatacttgttctcacaccatttctcatataacttagattcaatctcctttgggttgtaggttgtctctaacttctgactcatagtttcctcctcataaatcgtgtcttacacatctcttcacagttttttcacattttactgtaatgaaaacgccctttacattacgtaaagggcgattgtagtcgcggtaccacctttattatatagaaaaaacttcctctatacatctcatcttattctttaacgggaacgactccgggaccatctagcaccattcgggcgcccgtatggatgttcaacagtccggctcgaaagctaccttctgcatctctgtcatcaagcgcctttcagcctccgggccactctctctttcgaaaacgaacttatgcatactcctcttcttcaatgcctttacgtataaactattgaatatcatagccatcgaaaagtattttgtcaaggagtttaaagaattttcagaaagtcttaagggtttgccgctaccttgcgcgccttcttgaaactgccatgattccagccctcttgttccgttggcattgtgcaaattttccaaatgtttgtcgaataatatatagacctgtcgaatacacccatgatacaatagtatataggcagcgagcgtgctgcctgctatattaaggaatgaatcatcagggagggatcaattatgaaatgtccacattgtggcgcagacttgacaggcgatacctgtgaattctgtggccagaaagtaatcgaaaaagaccagggcagcacggcaaataataccgccgccggaggatatgccggatataaccctaataatccaggcgcctggaagccatcaggcccgccgccggagaaatggtacgagaagacctgggtcatcatactcttcttaatcttcttatggccgatagggctgttcctgatgtggcgttataagaagaactggggaaaggttgcaaagatcagcatcaccatcgtggtggcgctctgcgtgctgtactcctgtacgtcgccggataagccggatacggacaagacagccgttcctaagaccactacagtcaaggatacggctaagtctgagccaaagaaggacgaacgaaaagaagagatcgtaaaagaacactatgagatcgacctgtccgcaggcaattatactgctggtaaggatattccgatcggaacctataatattacagcaacttccggaaccggaaatgtatcttcttccaacatgttctccggcggactcaatgaagtcatgagcccggacgacgacggaatctcccagcagtcctttaacggactaaaaatgaagaaggacgtagtccttacggtcggcggggatgtcgtcatacatctgatcgccgaggatgcgcagacaggcacggtcgcagcaagaggcgaggcttccggaagtccgatagaccttccggcagggaactacacggcaggcacggaatttcctgccggcatctacaccgtgatcgccacaggcggcaccggaaatgtatcttcttccaatatgttcgatggcgggctcaacgaagtcatgggacaggaaggctttggagttacacagtttaacaatgccgtcttcaccgaaggcgtaacattaaccgtatcaggcacttccatccaactggttcctgtaggagaataataaagcacataaattcatattagatcaggctcaggctcttcatcacatacagccatcccgttaaggtaaacgcgctgaacagggtcgtcaacatgatcacgctggtagacagcacgccctcatggcccatattcctggccatgacaaagcagctgaccgtggtagctgagcccagcattaccaggatcgccaccagttcctcctgccggaatcccatctgagcggcaagcggcagaaagatggcgacaaaccctaccagcttaatcaatgcggcggtcaccgccggcttcaccttggcaaaggcctttcggatatcaaatgtggctcccattgccataagccccataggggttgccactcctgccacgctatctaccgtcttctccatgatatggggcatcggtatgcgaagcgcggaccagattagtccggccacgattccgatgataatcgggttcttgataatccctatcagcgtcctctttacgacatggccgtccagccccttctggcccggccggaataaggacagcaccagcacagccatcatattgtacaaaggcacgcttccaatgatcattaaaggagccatgcctgtcgttccgtaaatattctggataaacgcaattcccagaagcgccgcgctgcttcggtaggaagactggataaattctccttgtatggacttatccttccaaagaaatgagattgccgtggaaatggcaatgcttatcaccgttgctccaaaacagaacagcacgaacttcatattccatacttcttcaaagtctaccgttgccaggtcattaaataccagcaccggcagcggaaccaagaacacgaatttgttcatctgatccgccagttcctcgccgataaagccgattttcttaaaaagaagccccagtaccatcattaagaataccgggaccgttgcattcagactaaaaactagattttccatttgctgcatgattcccttccagacaggcataatccagcctgtttttgcctcttactattttgcaacaaaccagcggcatctgtcaatgattctatttcctgcttactgtaataactttttatagatattataatcctcttctttaaacacattgaagatcacccgttccagcttggaggaagacaggcagcggtccaccgtctctacggcgatctgggccgccagcttgttaggaaaatggaattctcctgtagagatgcagcagaacgcgatggacttaagcccttccttctctgccagcttcatgcagtttatatagcaggacttcagttcctccttctgcctctgtgtaacctccagtcccacgatcgggcctaccgtatggattacatgactggccgggagattgtatccttgcgtaatcttcgcttttcccgtgggctcttcatggccctgctcttccatcatcctggcgcactcgttccgaagctgtatccccgccgcggaatggattgcattgtcaatacaaccgtggcagggcacaaagcatccaagcatctggctattggcggcattgacgatggcatccgcccgaagcctggtaatatcccctctccagagggagatcctgtccatattcttgatgccgatacaggtgtagatgtctccaatgaccgggatatcctcataatccacaatgcctttttcttctgcctcttctgtcaggaactcgtcctgtccggtcatgaattcttctgaagcctcccctggccagcgcacattcattaggcttcttagaagccgacgcttctcatcataatttatgggctctctgatggatgcatatccatcgttttcattcttcaaatatcgaatcaggctatctaatctctcttctcttatcataggctcctcctagtcctgcaagtatccggcaatcaccgaatacgcccggtaaagttcctcgtaggttgtccggcagttagccgggctggtggatggaagtccaatagcctccacccctgtctcagggtagcaatatctcttatataactgggctgccttagtccctgtcgtgaatatggcccggatatccgcatggtcaagaatcctcttcatatcattggccttcgggttgcggatactgccgtcatccgctcctttgatctcgcatccggccagcacgtcccagacagcgatacggtttcgcagcgcaaaagcaatcttctcctcctttgtcagtggaagttcctcaccgcacacgtccgatattaccttccagaagcgattcctgggatgcccgtaatagaatcccacttcccttgacttcggagaaggcatggttcccagcataagaatccgggactccttatcatagattggctggaagttatgagtaatgtattctggctccatcttatcacgctcctttattcagacgcaagcaacctccataggcagtcctcctagtacactttaatacagggtattcatgccctgcgtaagcgggggcgcctcccagaatcattgtattttatccatacatattttcaatatatcatcagcgaaagataccagtcaatcagccgaatcccatacagcaggccgattgccatgcctatgcacaggaatggcccgaaaggaaaatagtccttgcggtcagccttctgggcagccaggagatagcacccgtagatgccgccaaagagaatggccaaggctgccgacaccagcgtgatcttccatcccagaaatagtccgcaggcagccatcagtttaatatctccacctccaaaagccccgggaatcacgatcgccagcacaagcatcggaaggcttacacacagcgcgcctgccagacgggctaaaagcgaagtctcgggcatggtgaatatggatatggccgcaagtatcaccatcgcgatctggcatccatcttcaatctccattgtttctatatccaggaatgccaccaccgtcaatatgcaaaaaaatgcaaataccgtcagggccgttccgtagttttcgtatttatacacgcacagcagcgccaggaggcctcccagcacttctatcagcgtatccctgattccgatggatgccttgcagtaacggcatttcccattcaggaacaggtaactgaatactggcaccaggtccttaggttccagcctctccccgcaggaggggcatatagagaagtactttacaaaggacatctgccttggcacccggtaaataatcacatttaaaaacgaaaaaatgcaagttcctgcaatgatcaccaatatgcccattataatttcacatatcaatactcccatacattcctccttgcataaattatatagtgaaacctttttgttcttacttttgtctccaattcttaatcattaactattatcctcctatttctgattatgaaccttagtcttgggcctgcacttgttttatgtaatctgccctctggctggagaaaagttcctaaccccgtcatttcagcatttcatgacatctttatttatgatatgtttaatatacacttttcttcaaatattatcaataatcaacaaaccaatcctaatcatacattcttatgcattttcctgaaaatttagtttgatcatggcagatgtgtcaaaaaataaactttatcctaaaattacatattaaaattgcataaacaattcccctatgctataatttttccaacacgtactaatcacaaagggtaacgcctgcgtgaaaaggcgcacagattcgtatgatatataggggcaggggaattctgcctttttaggacctgacgccataggcgccgggtcttttttattcggtttcatcatgaagaaggcgcggtagaacgaatactaataggatggggtgatctatgaaagatttaaagtatttaattgataagctgaagacacaaagctccctgactcgggatgaatggacagcgctgattgtcggaaggacgccggaacttgccggatatctcttcgaactcgcccgcaaggagcgccacctgcactacggacatgacgtgtatgtccgggggctgatcgaatttaccaactattgcagaaatgactgcctctattgcggcatccgcaaaagcaatccccacgtcagccgctaccggcttagtgaggaacatattctggactgctgccggatcgggtatgatctgggatttcgcaccttcgtgctgcaaggcggggaggatggatattacaccagggagcggatggtacatgtgattgaaagcatccgatccaggcatccggattgcgccatcacgctttccatcggcgagaaatcccgggaggattaccaggcattctatgaggcaggcgccaaccggtatctcttacggcacgagacatttaacgccaaccactattccaggctgcatccgccgtctttaagcgctgcggcccggcagaaatgtctctgggatctaaaagacattggctaccagacaggcactggattcatggtgggctcgccttaccagacgccacaggatctggccgaagatatgctctttatccgggaactcaatccgcagatggtgggcatcgggccatttattccccaccatgacacgccgttttccaacgaggcggccggaactctagaactgactttgtttatgctggggcttcttaggctgatgcttcccaaggtcctgctgccatccaccacggcgcttggcaccatcgatccgaaggggcgggaacttggaattctggcgggggctaatgtggtcatgcccaatctgtcgcctaccggcgtgcgaaaggactatgcgctgtatgacaacaagatctgcaccggggacgaggccgcggaatgccgccaatgcctggagaggcgcatggaatccatcggctaccgcgtcgtcacagccaggggcgattcactgaacctataaacgattatgctatctgatatcaggaggaaataagttatgtatgatgtaaattcaaaacacgctgaagactttatcaaccacgaggagattttggagactctcgcttacgcggatgagaacaaggataatctggaactggtggaatccttgatcaataaggctgccttaagaaagggactttcccacagagaggcctccgtgcttcttgcctgtcaggaccccgccatgaacgagaagatattcaagctggcagaacagattaagaaggatttctacggaaaccgtatcgtcatgttcgcccctctgtacctttccaactactgtatcaatggatgcacctactgtccttatcatatgaagaacaagcatatcgcaaggaagaaactgacccaggaagagatccgcaaggaagtcatcgcgctccaggatatggggcacaagcgtctggctctggaggccggcgaggatccggtgcacaacaccatggattattacctggaatgcattgacaccatatataaaatcaagcataaaaatggggccatccgcagggtaaatatcaacatcgcagccacgacggcggacaattaccgccttctgaaagaagcagggatcggtacatacatcctgttccaggagacctatcataaggaaagttatctgcagctccatcccacgggtccgaagcatgattacgactatcacactgaggctatggaccgcgctatggaaggcggcattgacgatgtgggagtaggcgttctgttcggcctggataagtttcgctatgaatttgcaggacttctgatgcatgcagagcatctggaagcagcattcggcgttggcccgcataccatcagcgtaccccgcctgcgcaatgccgacgacatcgacgcgtcctcctttaccaatggaatcgatgacgatacctttgccaagatcgtggcctgcataagaatcgcggttccatacaccggcatgatcatctccaccagggaaagccagaaaaccagagagcgcgttcttcacctgggcatctcccagatcagcggaggttccagaaccagcgtcggcggctactgcgagccggagccggaagatgagaaatccgagcagttcgatgtcatcgacaaccgtactttggatgaggtcgttcgctggctgatcgagatggaatacataccaagtttctgtactgcatgctaccgggaaggcagaaccggcgaccgcttcatgtccctttgcaagagcgggcagatccagaactgctgccatcccaacgcgctgatgacgctggaggaatacttgaccgattacgcttctcctgagacaaaagcgcttgggcagaaactgatcgacaaggaagtattcaacgtaccgaatgaaaaggcgcgcgcggtagtcctggagaatctgaaactgatccgtgaagacaaccgaagagatttccgtttctaattataggtccatccgggcccaaaggaggtattcgaaattatgagtctaaataacacgccctcttccgagcgggtacacatcggcatcttcggcaggcgcaacgccgggaaatccagcatcatcaatgccctgaccggacaaagcctggcaatcgtatcggatgtcaagggcaccaccaccgaccctgtgctaaaggccatggaactgcttcctcttggccctgtcgtcatgatcgatacgccagggctggatgacgaaggagaacttggagcgctgcggatccagaaggcataccaggtgcttaacaagacggatatcgccgtcctggtggttgacggcacggctggcatgacccgcgaagaccttcttattcttgaccggatcaaggataagaaaatcccatatgtgatcgtcatgaacaaggctgacctggccggcccgggtgcagcgtctcaggccgctccttcggacacgccggatgagcacgtcatctgggtcagcgcaaccgccagccggaacatccatgaactgaaggaactgatcgcaggccttgcccccgccgatgacggcgaccgtcgcattgtaggggatttgatccatccttccgatttcgtagtgctggtagttcccatagataaggctgcccctaagggccgcctcatcctgcctcagcagcagacgatacgggatatcctggaatcggatgccacggccatcgtggccaaggaagatgaactaagccgtacccttgagactcttgggaaaaagccatctctggtcatcacggacagccaggtctttgccaaagtttcgaaggccaccccgcaggacattcctctgacttctttttctatcttatttgcaaggtataaggggaatcttaagactgtagtaaatggggccagatacctggattctctgaaggagaatgacacagtactgatctcggaaggctgcacccaccaccgtcagtgcgaagatatcggaacggtaaaactgccacgctggatacaggagtataccggcaagaaattaaactttacgtttaccagcgggacggaattcccactggaactaaatccctatcagttgatcgtccattgtggcggctgcacgctgaatgagcgggagatgaaataccgtctcaaatgcgcacaggatgccgacgttcccatgaccaattacggaacggccatcgcatatatgcagggcatcctggaacgcagtctagacatatttccatctttagattatatttagaaaatcttcagaattataacaagggatacttaataattcccctatacaataagaccatagaaagcaagcattccggtcttatcgtataggggggttatttatgagagcatatattgaagaaaggaaaaatgaaatacttgccatcagtccatttgcggatcttaactatgagcgtgcatattccgccacatccctgatcttgatgttcttcctcttttcctttaccggatggatctgggaagtcctgatccacatcatagaagacggaatgatcatcaaccgcggccttcttctcgggccatggcttcccatctacggaaccggcggcgtccttatcctgatgctgttaaaaagatggcgcagccagccgcttataaccatggggctcatcatgctcttatgcggaaccgtcgaatacattaccagcattggcctggagttctttttcgggcaaagatggtgggattacagtgacatgctctttaacttccagggcaggatatgcctggaaggactgctgatcttcggcatcggagggctgttcttcatctacctgatcgcgcccaagatcgacaacctgcttcaaaccgtatcgcagaaggcgaaaatgtacctgtgcgcggcattatccttcctctttgttgtagacttgattcgttccttcctgtccccgaatatgggattcggaatcacggggtaacggtttaccttacttcgatcctccccatcacttctccgataggcgccgcaatcgtcagttctgctcctacttcttttgcggtagcgctcttattgatcaccaccaggtgcctgccacggaagtaatcgatgaatcctgccgccggatacacgatgagagacgtcccgccgatgatgagcgtatccgcctcgctgattgcccggatgctcttatccaccgtccgggagtccaggctttcttcatatagcaccacatccggcttgattgtgcctccacaggagcacttgggaattccttcggagttcttcacataggccgcatcataggacttgccgcatctctggcagtaattgcgcagaatactcccgtgcagttccagcacgttcctgcttcctgccgcctggtgaagtccgtcaatattctgggtgataaccgccgtaagcttgccagccgtttccagctgggcaagcttacagtgggccggattgggcttcgcatccagaaacatcatcttgttcttatagaattcataaaaatcttccgttctgcttacaaagaaactgtggctaacgatctgttccggggagtacttatacttctgcaggtagagcccgtcagcgctccgaaaatccggaatattactctccgtggatacgcctgcgcccccgaaaaacacgatgttgccgctgtcgtcaataatcctctgtaacctgcttacttcctcttcatacatggcaattcctcctgacatgtctgctgtaatcctttcacatacagcctgctaatttccgcgttctatccaatcaatgacatcccttagactgccaagttcagccgtaatgccatctttgacttcctccggcaccaccaccacatccgggatgtggataatatagccgccggctgccttccctgccttcaccccggatacgctgtcttccagcaccaggcactcccctattggcacgcccagatcgtctgccgctttctggaaaatatccggaaatggcttgctgcgctttactttattcccataggcgactgcgtcaaaatactcatagaccccggcgatcttcagcatcttctcagccagcgactgctgggtggaggtagccactgccatacggatatcctggcccttcagatattctaggagttccggcagcccttcttttaagggaacgcctttttcctcgatgtagcggtgctgcaattcatctttgcgccccatgcagccgtcaaaatcaaactcctgtccaaatctttgaagaaaggcattacgaattgccgccggattctgtccccggaaactgtccaggaattcctccgtcatgtcaatcttaagttcatcgcctacctggttccacagaaccgttgccagacgttccgtatcaaacatcaggccgtccatgtcaaatattacgcctcgtaccataagttatgactcccttttcttgtatactacaatcatttctattgctctattctatcgaatgtctaactgtcatgctattgtgatcgattcttgctatagccggtaaagaattccgataatgcatccaaggtcttcaccagcacgggaatctccgcctcgtccagcttatccaggatcgcccgggtcatctggcggtgatagtcttcgtgatgccggtacgccttcacgccccggtccgtgagcttcacgaataccaccctgcggtcttcctcgctgcgcctgcgctctacatatttcttattcaccaggctgttcatggccgtcgtcagggagcctacggtaatattcaacttcttggctatggaggacatgttgttgccgtcgcccagcccgatggcctcgatgacgtgcatgtcattattcgtaagatccttaaactcttctgtaataatggccttctcctccaattcccagatctcgttgatcaggttcaccagaatattgttgattgttgcgtatgcgttttccattccctgctaccctttctgcttggcgattcttgttatatccacattataccctctccggcatcagagaatcaatcacttcttttaccgtttccaaatgatctgccttgtaggcgtatgcaccgcagaaaagaagggcatcatccacctctcccctggccgcatgtacgagagcatccgtaatgcagtaaggaatctcactgggattgcatttttggaggcagccgtggcaggaactgtgaggaatccgctcccctgccatgaccttttccataaatggattcaagattgcgcgccctggcattcccaccggacttttgacgatgacgatatccgtttctttcgcgttcagataggcttccttgtacttgatatgtgcatcgcactcttctgtggttacgaatctggtggctgcctgaatggcatctactcccagcgaaaatgcatgctctgcctgcgccttattttctattcctccggcaagcgccaccggaatccggcactggaactcctcttcgtaggacctcaccgtgtctaatatgtcgctgacttccgcgtcataggctgcctggtcataggcttttaactgttccttggtaaagcccaggtgccctccggccttcggcccttcgataaccagaagatccggcatcctcttatatttcctgccccagtacttcaggatcaccttggcggacttatcggtggagacgatgggggccagcttcgcccggctatcgcccgcgattcttggcagatccgtgggaagtcctgcgccggataggatgagatccgcaccggcatcgatggccgcccttacatactcttcataatgccgcatcgctaccatgatattaaatccgatgattccatccggcgcgattgccctcgccttgtcgtattccttttgaatggccctgaggttcgcttctttggtattcgtatcaaaatccggctccttaaaaccaatctgagcggcagagatgatccctatgccgccctctttcgcaacggccccggcaagacggcccaggctgatccccactcccatgccgccttgtatcaatggaacctttgcttctatattccccattttcaatggtcttgcttccatattctttctcctacatcttccgaaatctatcgtacctatgctccgtcagttcttcagccggcagtttcccataggcaatgaaaaaccgctccagctcccgctccagctgcgtaacgaccttctttagattctgcacggtatagtgagccggctccgggaatacctgctccacgattcccagacgcttaaggtctcctgccgtcagcttcatcacgcctgctgcctcctttgccatggtgctgtccttccacaggatgctggcaaatccttccggcgagaggatggaatagatggagttctcaagcatccatacctcgtctgccgttgccatggcaagggcgccgccgcttccgccttctccgatgatcacggagagtaccgggacttttaagcctgacatctcatagatgtttctggcaatggcctctccctggcccctctcctctgcttccaggccgcagaatgctcccggcgtgtctacaaagcagatgaccggacgggcgaatttctccgcctgcttcatcagcctcagtgccttgcggtagccgtcgggagatggcattccgaaattgcgctcgatgttctccttggtgttggttcctttggcctgggcgatcaccgtcaccggcttgccgtggaatctggccactccgccgatgatcgccttgtcatcggcataatatctgtctccgtgaaattctatgaaatccgtaaacagtgcttcgatgtagtcgctgcccaccggacgatccttcatacgggaaatctgcacccggtcccaggcatttgccaccttgttgttcggcagggctgcgtctgcttcctctgcctccatctctatctgcgcttccccggtttctttcaatccgatctgaaaaatagatgattcctcttcatattctgtctcatcctcattcttatgcagtttcaggattcgggacagcgtctcctttaactgcggacgctccacgattccgtcgatgaatccgtgctccagaaggaactcggaacgctggaatcccttcggcagtttctgcccgatggtctgctcgataaccctgggacctgcgaatccgatcagcgccttcggctctgccagtatcacgtcgcccagcatggcgaaactggccgtcacgcctccggtcgtaggatccgtcagtacgctgatatagagaagccctgcgtcgctatgacgcttgagggcagccgaagtcttcgccatctgcatcagggacgttatcccctcctgcatcctggcgcccccggagcacgcgaagataatcaccggaagttcttcttcggtggctctttctaccgcgcgggcaatcttctcgcccaccacttcgcccatgctggccatgagaaaacgtccgtcgcagacgccaagggcaacttcggttccatgaatacatgcttttcctgtaatgacagcctcgtcaagacccgtcttttccttaagtacttccagtttctctttgtatcctttgtaatccagcggattcctggtggcaagtccctgatcccactcttcgaacgtgtcttcatccgctaccatctctatgcggcggtatgcgtggacacggaaatatcctccgcattttggacagatataatagtcctttttcacatcctctgcaaaaatggcactgccgcacttattgcatttgcgcagaagcccttccggaacttccggcttcgcagcactcaaagaaatataatttttcctgccagaagaaagtctggtctttttaaacatgttgtctaatttcatagaatgtcacctttacattttctcaataaattcaatgtcaatgtccccggagagatagtccgggtggttcagaatctcatactggtagtccacgttggtatctattccttcaataatgatctccccaagggcgctctgcatcttgcggatggcctcattgcggttcttggcccatacgatcaacttcgccaccatggaatcatagtaaggcgggatagtatagccgctgtagattgccgcatcaatgcggattcccttgccgcccggcagatacatatccgttatggtgcccggagacgggcggaatcccttttccgggttctccgcgttaatcctgcactcgatggcgtggccgctcagatgcacgtcttcctgggcgtaagatagtttcttacccgaagcgattcgtatctgctccttgatcagatcgatcccggtcacccattccgtcaccggatgctctacctggatacgagtgttcatttccataaaatagaagttcccattcttctccagaaggaattctatggttcctgcatttacatagcccgctgccttcgccgccttgacggccgcatcccccatcttccttcgaagttcctcggacagcgcgacggacggggattcttcgatcatcttctggtggttccgctggatggaacagtcccgctcgccaagatggatgacgttgccgtagccatccgccagaatctggaactcgatatgccttgggtgctggacgaaatgctcgatatacatggtattgtcgccgaaggccatctgggtctccttctgggccgttttgaagctctgctggaattcttccggcgtattggccacgcgcatgcctttgccgcctccgccaagggcagccttcacgataaccggatatcccacctcatccgcaatcctggcaccttctttcgcgtcatagattggctccttgcttcctggaatcaccggaacgcctgcggctaccatggtattcctggcttcctgcttatttccaagccttgcgatcaccttggagtccggtccgataaaggtgatgttgcactgctcgcataactccgcgaactttgcattctccgacaggaacccgaatcccggatgaatggcatccgcaccagtcacgatggttgcgctgatgatgcggtccatgctgagataactctcgcttgacggcgccggcccgatgcagaccgcctcgtctgccagtttcgtatgcagggcctcccggtctgcctccgaatataccgccacggtctcaatccccatttcccggcaggcacggatgatacgcactgcaatctcgccccggttggcaattaatactttctttatcatgtatctcacctatccaatcataaatgtcaactctgcgcttacgaccgtcttgccgtccacgcttgctatcgcctcgcccacgcctacagggcctttctgcttgatgatcttcgtctccaggcgcaccttgtcgcccggcacgatcttgcccttaaacttgcacttgttgatgccgccgaaataggcgatcttccccttgttcgcctccatgctcaagatggcgaccgcgcctgcctgcgccagcgcctccaccgtcagcacgcccggcattaccggttcctgcggaaaatggcccgcgaagaactcctcgcggtatgatacgcatttataccccacggcatactggcccggctcgtagtcctcgatgtaatcaatgagaaggaacgggtggcggtgggggatgatctgcttaatctggttgatatctaaatggttcatattgcctccttacgcacgtaacatttttcactttaacacgtaacatttttgaaaaatgttacgtgttaaagtgaaaaatgttacgtgtcaatttgcaaaactggtgtgttaaattgcgcaaactggtgcgtcaaattaatttatccaatgcgaaacagcggctggccgtattctaccgcctgcccgttctcgacgtaaatctccgcaatcgttccgtcatactcgctttcgatttcgttcatcagcttcatggcttctacgattgcgagggtctggccttttttcacggtatcgcctacggatacgaatggcgctgcgtcttcggacggtgctgcgtaaaaggtgccgaccagcggtgattccacgatgtctccttccggcttttggccggcatcagtatttccaactgtaactatgcctgccggggaaatctctgttccacccggcgctgcggatactacctgtacttttccttgttttttcgtgagatgaagcttcactccatctacttcatatttcaacccggtcagttctgactctgatacggcattgattattttgataagattctcaatttccatcgtgttcaagtcctttctaaccttcatttttagtcttcatatttcttgaccagcagggttgcgttgtgcccgccaaatcccagggaattggtcaggacatagttcacatcctttaagacgggcgcgccgatggcgtaattcaggtcgcattcttcgtctgccacttcgctgcctacggtctggtgaatgaatccctcctggatggtcttgacgcaagtgatgaattccactccgcctgccgctcccagcaaatgcccgatcatggatttggtggagttgaccaccacgtccttggctgcttctccaagggcgctcttgatcgctctggtctcgaacaggtcattgtgatgggtgctggttccgtgggcgttgatgtaatctacctgagaaggctggatttggccttcttctatagcaagggacatggctttggccgccccgcttccatcttccgcaggggaggtgatgtggtaggcatctcccgttgccccgtagcctgctaattccgcatatattttcgcgcatctggcctttgcgtgttctaattcttccagtattaccacgccagcgccttcgcccaatacgaagccgttcctgtccttgtcaaatggaatggaggcccgcttcggatcctgactggtggataatgcggtcagacttgtgaatccggccactccggtagggcagatgcaactttccgttccgcctgccaccatgatatccgcatcaccatactgaatggcgcggaatgcgtcaccaatgcagttcgtcccggacgcgcacgcggtcaccacattggtgcatttccccttgaatcccagctggatggaaatgtttccggccgccatgttggatatcatcagcggcaccatcagcgggttaacgcgggaaggacccttggtcaggatcttctcgtattcccgctccaccgtctgcaggcttccgattccggaacccacgatcactcctgcacggaatgcgtcttccttttcaatctcaagcccagcgtcttcataagcttcctttgcggcagccaccgcatactgggaaaatagttccatccgctttgctgctttgaagtccatccgctcttttgccacgaagtctttgacctctgccgccagttttactttataatctgtggtatcgaatctggtaatctctccgattccaacttttcctcctttgatcccattccagaactcttccaccgaattgccaatcggcgtaattgctccaagtccggttacaacaactcttcttttcatacctgcgtctcctttacattgccatgccgccgtctacgtgaagcacctgtcccgtgatatagcttgcatcctccgataccagaaatgccactgcctgcgccacctgctcaggctttccgaatgttccaagagggatctggcttacgcaggcctcttttaccttgtccggaagtacttccgtcatgtccgtggcaatgaatcccggcgcaatggcatttaccgtaataccacgggaagccagttctctggccgccgctttggtaaggccgattacaccggccttggatgcggcatagtttgcctggcccgcatttccgcttacgcccacgacggaggacatgttgatgatgcgcccgcttctttgcctgagcatctggcgggatgcaaaacgaatggtgttaaacgcgccttttaagttggtgtcaatcacttggtcaaaatccgcctccgacatcttcatcagaaggccgtccctcgtaattcccgcgttattaaccaggatatcaatgcttccataagtcttgatgactttctggataaatgattcgcatttcccgtaatcggaaatattgcactggtatactgccgcttttccctgggcgttttcaatctctgcttttacttcttctgccttgtctttggagccattatagttgataataacggtcgcccccagggaggccagcttacatgcgatcgcttttccaatcccccgggaagcccctgttaccactgccacttttccttctaacataattcacctactactttctctatatcctcccatgcggaaatgttacagactttcacatcacggttaattttcttcataaatcctgccagcgtgcggcccggccctatttccacaaaggtgtccacgccatctgcgatcatgttctccatgctctgcatccagcgcaccggagaactgacctgttctgccagaagttcccgggtcgcggaaatgtcgtctaccttctctgccgtcacattcgttacatacggaatctgaagcgtatgtaatgcagtattcttaagttcttcagccagttcttctccggccttcttaaggagcggggaatgaaacggtccgctgacattcagcatgatcgcgcgttttgctcctgcttctttcaacttctctgccgcttcgctaactgcatctgtgcggcctgtgattacaatctggcccgggcagttataattagcaatggtcacgccgtcgatcgcttcaattaccttttcaatggctgacgcatccattgccatcaccgcgcacatggctccctcgcctgccggcacggtattttgcatcagcatgcctctctttctcaccagccggatggcatccatatcgtccatcccgcctgcagccgcgatcgcgcagtactcgccaaggctgagtcctgccgtaatattcggcttaagccctttgtcttctgcgaccctcgtcatggcaaggcaggtagtgaccagcgccgcctgcgtatattctgtaacgtcaagtttatcattttcctcaaagcagagcgccttcatatccagttgaaggacttcccccgcctcgtcaaacatctttccggcaatcacgctgttctcataaaaatccgcacccatgccggctttctgggcgccctggcccggatagataaatgcgatcttactcataaaaacctactcctttaatcattgcatccgtctcttccactaatttgccaatcagttccttacaggacattctttccttaaccatgcctgcaatctgccctgccatcacgcttccgttcttcacgtcaccgtccacgacggccttgcgaagtccgccaagggtaagatgttctaattcctcaaaacttgcgcctttattttcaagttcaatatattggttcgtcatttcattgcgaagggcacggaccggatgtcctgtggttcttcctgttactctggaatcaatatccttcgcctttataattctttctttgtagttatcatgaacctgtgattcatctgttactacgaaatgggtgcccatctgcactccctttgcgcccagcatgaatgccgccgccattccgcgtccgtccgcgatcccgcctgcggcgatcaccggaatgcttaccgcgtccacgatctgcggtaccagtaccatggtggtattctcaccaatatgcccgcctgcctcgcagccttccgctacaagagcatctgctccacagcgctccatacgtttggcgagggcgacagaagcaaccacgggaatcacttttactcccgcatctttccacattttcatgtatttctcaggattgccggctccggtcgtcaccactttgatgccttcttctacgataacctttgctacctcatcagcgtaaggactcataagcatgatgttcacgccaaatggcttatctgtcagcttctttgcttcacgaacctgctctcttacccagtcagcaggcgcgctcgccgctccgataaggccaaggccgccagcgttcgacacacctgccgccagatgatattcggcaacccatgccatgccgccctgaatgatcggatattcgattcctaataatttggttacttctgtctgcatatttaaaaccccgcttcttttcttattctttatgatcgttgatgtatttgataacgtctcctactgtcgcaatctgctccagatcttccgtcggaatctcgattccaaattcttcttccaacgccatgactaattcaaacaagtccagggaatctgcacccagatcatctttgaaggaagattcctctgtgattgttgctgcgtctactcctaaattttctgctaccatttctttgatcttgtctaacataatattcgctctcctttttcaatgcttaattcatatatataaactggcatttgccaatttatttccacttaagaatgctcgcgccccaagtaagccccgcgccgaatcctgccattacgatcttctggcctgacttcagaattcctttccgattcaattcatccaaaaggatcggtatgctggcggatgaggtattgccgtattcctgaagattcataggaaacttctcaatcggctccttcagccgctttgccacggcttccacaattctttggttagcctggtgaagaatgtagtaatccacatcctcctgctctatttcatttgcttccagcacttcccggatgacctccggcaccttcttgacggcaaacttaaataccgcctgtccgtccatctgcataaaatgctcatcgtcgatcatttcctccagattgatctcagaagtcaggccgttgccctgatatctgctcttgcaagtgagcgcgtctcccttgctcccttccgaatgggttaccggaagataatacctctctcccccggcccttactacggcggctccggctccgtctccgaacaggatgcaggtaccccggtccttccagttcgtcaggttggacaggctctcgcttccaatcaccagcgcggtcttatataccccgcctgcgagataagccgttgccgtattataagcaagcacgaaccccgtgcatgctgccccgcccaggtcaaagcaggtggcgtggatggcgcccaattccttttgcacctggcacgcggtacaagggagaatcacattcgatgaaatggtcgccaccagaatcaagtctacctcttccggggagacgcccgcattctcaagcgcccggcggcccgcctgcaccgccatggataccgtcgtctcctctgtaatgatgtgccgcctcgcgaccccggtccgctcctgtatccactcgtcgctggtctccaccagtttggcaatatcgttgttgtccattatatacgacggcgtacatgcccccgtaccatagattattccagtcatatgagttcctctgatttattttgaatgtaaattattttgactttcaaagtatatagccatttttttcatttgtcaagtactttgaacatcaaaacatttcgacaaataaataacagggcagcgcagcgttgtatatattgatggcgcgcctcttgaaccggactatacggatcaggaattttctctgttaaacttaatatctgccccatttttcccgcacgatcctgagccaggcgcctgcaatggagaaggaggaagccttcttcctccttctgaaaaatgatcttcatccttattatggatatgggacaacagcagtcgctgaggctgaactgcaaaaaaactaaccgctagccttccaactcgtcatacaagtagcatgcaacataatggccttcttctacttcccgtaaccttggcgcttctttcctgcatttgtcctgtacatgccggcatctagcgcagaagcggcattcctgtcccggattaatgggacttgggagttcgccctccaggcggatgcgctgctttttcgcctcaatttctggatctggtatagggattgctgaaagaagcgcctgcgtatacggatgtttgggattctcatacaacgtatccgacgctgttatctcaactatgatccccagatacataaccgccactctatcagaaatatgcctgaccattgaaagatcgtgggcaataaacagataggtaagacccctgtctttttgcagtttcattaacaagtttacaatctgcgcctgaatcgacacatcaagcgcggaaatcggctcatcgcacaccagaaattccggctcaaccgcaagcgccctggcaatcccgatcctttgtcgctggccccctgagaattcgtgcacatagcgattgatgtgttctttctgaagccccacgatccgcagcaattccttcaccttttcttggcattgttcggaattctctgccatcccatgggcatacattccttccgcgataatatctccgaccttcatccggggatccagggaagaatacggatcttgaaacaccatctgcacttcttttgtaaacgctttcttatccgcgcccttcagctgatgcacattctgtcctttatacagcacttctccctgggtcgcatcattgattcctatgcaggttctcccgcatgtcgtttttccgcatccggattcccctacgattcccagcgtttctccctttttaatatagaaagatacatcatcgaccgctttcagcgtctgattctttcccatcttaaaatacttctttaaatgtcttacttctaacaaatattcttccgtctgcttcacacagccaccttcttcctattcctcagtataaccagccatcggatgatagagccagcattttgccttgtgcccctgtccaaaatcaaatgacggcggttcttctctttcgcagatgcacatggcaaggctgcagcggtcataaaacgggcagccttgcggaggattgataatatccggcggcattccatctatagcggacagttcctgttcccccatatccagcctcggaaccgctttgagaagcgctttcgtatacggatgcttcgggtgataaaaaatatccgaatctgaaccttcttccatgatcttccccgcatacattacgacaatcttcttcgccatatttgcaacgattcccaagtcatgcgtaatcagaatgatcgccatgttcagttcattctgcagttttttcagtaattctataatgtccgcctgtatcgttacatccaaggcagtcgtcggctcatccgcgataacgatctgcgggctgcaggcaagcgcgatggcgatcatgactctctggcgcattccgccggagaactcatggggatattggtgcatccgctttccgggatttgggattcctaccagtccaagcattctctctgcctccgcccaggcctggcctttatccatcttctggtgcagcagaagattttctgccacctgccttcctacctttatagtcggattcagagacgtaagcgcatcctggaatataatcgagcactctgccccccgatacgcccgccattccttttcctcatattttaaaatatcctttcctttataccagatatggctgccttccttgacttcccccggcggtgtctgtatcagccccataatgcttcttgccgttacggatttgccgcatccggactcgcctacgattgccagcgtctctccttcatctactgcaaatgaaacgcccctgacagactgcacttctccggcataactgtgataggatactctcaagtcctcaacctttaataattcacccatgattcccacctctatttcgttaatttagggtctaaggcatgctggagcatatcgcctagtatgttaaagcatagcaccgtcaccaagatcagaagccctggcacgactgcaagcaaaggattatgcaggatatacttctgggcgctttgaagcatgctgccccaggatgccatcggcagctggaccccatatcctagaaaacttaatgcggattcatccagaatcgacctggctatgctgatgctcgctgacacaattatctgagaggacatatttggtatgatatgcctgacaataatcttaaaatcgcttacgcccagacatttcgccgctatgacaaagtccctctcctttaggcttagggtttccgctcggaccactctcgccacgcttgtccacgaaaagaaggcaagcatcagaaccagcgtgaccaggctgggctgtacaaatgcgtagattacaataataaatagcagattcgggatcgaaaggaagatatcaacaatacgcatcaggatgctgtccacctttcctcccatgtatccgcttactgtgcccaaaagcgtcccgaacacaaccgatacaagcattgccgcaaagccgatcgtcagggatatcctgcctccgtacaaggctctggtaaatgtatctcttccaagatcatccgtccccagaatatgaccgtttccagggccttgtagcgcattctgaatatccagcgcgtccggatcataaggagatagcggcgccagcagggacgcggcgatcaccagcaggatcatgatcatgcatgtcatcgcaagcttattttccttcagcacgtatcgcaggttatataacgtgcttctattataggaagtctccgtttctttccctttcttttcaacagcaaggaaatcctccttagacagccgcaggggcctgttcgtgattatgctcttatccatgctgcgcctcctttccctgcttgatccttggatccgccagcccatagagaatatcggccaggaagtttccaatcagcaatatcgtgcaggaaagcatgatgatccccattatcatagggtaatccctgttgttaatagccgtcatgcataaagtcccaagtcctggccagccaaatacggattccacgataaaggatccggttaccagagtcccaaagttcatgcctacaatagtaataatcggaagcaggcaatttttcagtacatgattcttcaatatatagtttggcgcggctccttttgaggctgctgtcaatacatattcctcttccagctgattaatcgtattcgaccgcatataacgcacaaataccgccatattatttacggccaggacgatcgtcggcataatgccatgccatatgacgtccgccaccgaattcactcccgtcgtgcgcatgccggaactgggaagcagatccagatgcagggaaaatacgataatcatcagaagcgcgaaccagaatgatggaatcgaaattccgatataactgaagccgctgataatattatcgatccatttgttcttatgcgtgcctgccgcaagtcccatgggaatcgcaagtacgacggatagcataagcgatgccgccataagccccaccgttcctggcagccgctccataatctgcgggcgcacggggaggaaattatttaaggatattccccagtctcctgtcagcgtcttcttggcccagctggtatactgatgaaccacattgccggtcagccccagatcttcacgaagggcatccagctgctcctcagacattttgaaacttgattttcccggggaagtatacatatatagcggatctcccggtgcaaaataaataattgcgaacgcgaacatagataccagtataaatacaaatatcatctgcaatatacgctttaatagaaaattcttcatccgttcctcctctaccaaaaagagattcctgccattacagcagaaatctcttccctttctcaatctacctatgcctattcaagactcagttttgtataatcttcaaatacgggattcgtctgtaactcatcagcgcctttcagtttgcttgctgttgcaaatacatagtttggatatgcgatcgggtagatagacatatcttccattgctttttcctgtaacttcttatatatctctgctcttttagaatcgtctactgcggcgcgaccctgtttccaaagatctaattgctcatcgctgacctccaggttgattccccaggttccatcgaacatgcctgctatcacttcatccggatctccaaaagctccatagccattaaagtacatatcgtaatcggaggcatctgagaacacgcggtcaaagaatccattggactctatgccttccacttccagattgattcccacattctttaactgctgctggacaatcagcgcggtttctttcatgtagagcctgtcctggttatataccagttttaatgtcttgccatccagtcctgtttcttttaccagttttttggctttttccagatcctgttcatatcctttaatgctatcatcataatactgggtcgcattgctgaatatcgtgttggctgctacgcccatatcagttccatatgcaccgcttacaatctcttctttgtccagcgctgcgtaaatagcctctttcacctttggatctgagaatgtcccgctgaacttattgcatgcaagatagttcacgcggccctccgggaatgcgtgtacggtaatggcttcgtccccttcatacttgtctgccgatgtctggctcgccacttccatgaagttgatctctcccttttgcagcgctacttcctgggcgcttgaatcagggatcactttatagattaccttgtctatagatggcttctgtccataatagtcatcgaatctttctaattccagatattctccgtccttaaattctttgaccttataggggcctgagccgattcccttcagatttgcttctgagtttgccttaatatccgtatcgttgtcaaaaacatgggccggaagaagcggcaaggtgccaagtatcgtcacataagacgcagatacttccggaagcgtaatcttaaccgtcaggtcatccactttttcataagatactttctcttcgccaataaatacggtattcgcatatccagctccattgtcaggatctgcatttacatccatagagaatattacatcgtctgccgtaattgcttctccgtcatgccatttcaaattatcttttaactttaaggtaactgtcaggccatcttcagatacatccacgctgtctgcaagataatatctgatctctgaatccgttttcatatagagttcatcatagactgcgccaagcataagccagccctctttcatcgtctccagatgcttgttcagatttgtcactgaggatgacacgcccatgaccaattcattcgcatcagatgtctttgactttgtgtccgctgacttttctttgctgccgcagcccgcaagcatggccgctatcatggaaacacataataatgcacctaataatctttttttcatcttctcctccttttgtaattgtcttaaatttgtaccacaagattgtttctaactttttatttaaaaattcccctgcggtacgtgtattataggaggcgcaattattactgtcaatttatttcattattaatttaacgtgacaaattgatcttttttacatttgttcacattatattttctgtatattgacaaaataattcccttttcatctttatttattattgatgtaatcttataatcagttattcataataaattatatctatatgccttttttaatatcaagattatttattacaatcattcataatgttttccagtactctagatcctttccagccatccgggaatgcttatccctactattcccagcacgcccgctgcatagagtccattcacgaccagtccgatgcttgtcattgcatccttatggtttttcttcgtatagagaatcaggcagtacaggaatgccagaatgatctccacgctgtatatgcctatggtaatctctgccgccggggactttaaggcccattcatgcgtacggaccagcaggatcgtccaaggcacaaaggccagtaaaagcgcagctactgatgcaggtgttatctttttcattacaatcactctccttatcttctttctgctcttccaaagagcgtgcacgacagtgtcagggcagccagcgtagcggcgatggctgtgggtatccacggaatcagccgaatggagaaggttcccatatttgtggcaagttcatgcatcttggacgtgatcagcatcatgggatagcacatgggatatgcaaaccaggccttcgtattgatggcaagcacaatcggcactacggttgcaaggcccacgcccacagctgccactgtgttatggaatagaatcgccagcatccagtagatggctgccattggtatagatatcaggaataaaagggccgcgatctgcaagacatatcctggttctatcagaaagtcatactcccatttccgggatgcgatccatgccgccggaaaatatccggctgtgataaatgcgacctccatccccattaccagaagaatcgtgcagaacttggataagcaaagcgcagcgcctgacactggcagggacagcatcttaaggattccgttattgccccgctccgtctgcgtcataagcaccgtaattaccacaaggcttgacggcagcataaaccagacatatcccagaaatgactggatgaaaaagttattctcagggctgattccttctgcctgcatctcaaagttcatatctgcattcataatgcccgagatccacaccagaagaaccgggatcagcagaatcaggccaatcttcgatctctttaatttccttatttctattttcattaatcggatcaggttcatgatgttctcctccttagataagcggccgcgcttcctgccgccagtaatgctatggtctctatcactgccgcgatcagcatttccctgctctttgtcgaggagtagggcaaaaggaacggaaaataagccatgcttttttcctggacgaataactgggctgcaaacattccgatcatgccgattccaaaggacacccacatattcttcagcaggcaggcgatcagcagcatcagtaccagcgacggcagcgaataggcataggtgtatcccatcgtcttacacagagagacaaggatctgcttcccgccgtcaagccatttccaagtacagaaatacagcgcagccgtctctatggcaaataccactgccagtatgagggccagcaggattcctttatcaaaaaagaggacggccggattaacaggtagagcatccatcttctggattccattgttgacgtgctcgatatggtacagaatacaggcgccgataatgatcacgcacagattcgccatagccatcgtaagccagttggcatccatcacgatcgctgccggattaccgggacgcccggtaaacatctcggttcgcacggccagattgatcaccggaaacgcggctgagaatacgccccctgccagcagcgcggggataagccctgtcctccttatcttcttgatttccaatcctatcatcgtcccattttcctccttctgttatcttcttccaccatcgcaagaaatgtctcttccagattatccgaaggatagcccatgcctgcagcctctttcctcagatcttccagagagccttcaaacagcagccttccgtgattcaggattccgatgtcatctgccatcaattccacttccggcaacagatgggaggacaccaggaccgtgcagccaatcttatgcggcagggatcgtatcagcgtccgtatctcatggatgcctacaggatccaggccattggtaggctcatccagaatcagtatcggcggccttccaatcagtgcgccagccagccccagcctctgcttcattccgagagaatacttcttagcaagtcttttcctgtaaggggtaagtccggtcagttccagcgcgtcggctacggaagacttgggaagtcccaatatcttccttataatatctagattttcttccccggtcaggtttccgtagaaggcaggcgcttcgataaatgagcctacctcccttaatattttcatccggtctcccggatggctcatcccatctatggtaaaggaaccggaagacgggcgggtcagtccaaggaacatcttcatcgtggtggattttcctgcgccgtttggccccaggaacccatatactgtccccttccttatgtgcagattaatatcggatactgcggcaaaatctgaatattcctttgaaagatgcatggtttctatcatgttcatttttttatctcctcctatcccattgattcttatcaccgtatgcgtttattatataaggccctccttacatcatccttcctgctgccttacatttaccttacattttcccggacacggcaacgaagcctgtctgctatgctataatcaatttatcaaataaagaaggagcggtaattatggcttttgactatctcaaacgaaaaaaaatccttctcgtcgatgacgagccggaacttctgaatatggtgacttccattctggaaaatgaaggctatacgaatataaagaccgcatcgactgcctccgaagccatcgatgcatgtaagaatttcaagccggaacttgcggttctcgacgtaatgcttcctgatggaaatggatttgacttgctgcgggaattaaaaaggatctctgacttcccggttctgttcttgactgcaagaggcgaggatgaggataaatggacgggattcggacgcggggccgatgattacatggtaaagcccttcctccccaaagagcttaccttccgcataatggctatactaagaagaagttataaaaatgacgcgccactggtaattcttgccgaaagcgagatagattttgaccgggcggaagtccgaaaggctggcgacgtcctgcctctgactgccaaagaatatgaaatcttaagttccctctaccgcaacgccggaaaaatagtgaccattgatacgctctgcgaagccgcctggggggataatccctacggctatgagaactctttaatggctcatatccggcgtatccgggagaagatcgaggcagacccttcccatccggtttccctggtgaccataaaaggattgggatataaactgattctggaggaatagattatgaaaagcacgccaaaactcatcaagcattttctgctgatccttatgctcagcctgttcttgcttcttggcttcaatctcatcttacttgccacagtggggcaaaagtttgcatccagcggaagcccctggacttctgccgaagaggtggctgcatcccttactccatccggcagcggtttttccttatcggaggctggcgccgacactcttttaaagtccgcggcctgggcagtcctcattgacgacgccagcggggatgtagtatggaacagcgacaatctccccggcgaaatcccccggcattattccgcggcggccatctctcttctgactcgcggatatatccaggactatccgacttccacctgtggatatggagaggatctgctggtgcttggatttcctaagaaaagttactggaagcatatgtataataccttcagttatgatatgatcgcgcactcgccccagatatttctgaccttcctcctttgtaatctggcgatcatcttcttcatctactggggggtgaacatccagttattgaagtcgctgaagccgattctcacgggaatacaggcactgcctgaaagcgagaatgacattcaccttaaggaaaccggcctgctgtcagaggtaagcgcgtctatcaaccgggcttacgaattgattcgttcccagcactatcagcttcagaaaaaagaaaacgcccgggcaaattggattgccggcgtttctcatgatatacgtactcctctttctatggtaatgggctatgccgagacgcttgcagaggatccttccctccctgaagatgcccgcaagaaggcggacgttatctgccgccagagtcttcgcatgaaagacttgatcagcggtctgaacctgtcctccaggctggaatataatatgcagccactgaaccttaagaagatcccgctcattcctatggtacgaaaagccgtggcagacttcatcaacctggatattgataaccggtatccggttgaatggaatgcggatgactccctggccggctgctgcattatggccgacaaggacttaatctaccgggccatagccaatctgcttcttaatagcaggaatcacaacccaggaggctgccagatctgcgtacgggttgaatatgccgatggcggagtttcggatgccggatatgccatttctatagaagacaatggtacaggcatcaccagcaatgaactggatcgtctgtaccatgcttcatacgcttctctatcctgcgggcagagccacggactggggctcctgatcgtccgccagatcacggatgcccatcatggaaaggtggaacttggccacagtgcctgcgacgggttccgggcaaggattatcctgccttctgctccttcttaagttccatggcattcacacaatccgaatacgccgattgggtagaatttgattattattcccatgtccttgatcgatatctcggacaaactttcgacgatagagcctgccagttttcccttctctcctgctatgattacgccaaatccaaagaacagggcgatcacgttaatctggagcatggttgcgtccgccagcggctgtaccgcattgggcggaaatatgttgacgatggtatcgataaatggcgggcttaaggggcgcgtatagggctctgcgatcttagggcttttctgtcttacatatccaggcgttctacgacctccatagccgcaggggatcctgcaaccccgccgatgcctgtctcgcgaaggcttacatccatcttatcgccgacttccttcatcgcgtcaatgacctggtccaccggaatcttgcttgtaattcccgcaagggccatatctgccgctgccagagcatttaccgcgccgcctacatttctcttgacgcatggcacttctaccagaccgcctactgggtcgcataccagacccatcagattcttaagcgccatcgcgcaggcatctccaatccggcctgtgtctccgcctctgatatagcagattgctcctgccgccataccggagccagaaccgatctctgcctggcatccgccggatgctccggccagatatgcccggttcgcaataatctgtccgatgcctgctgccacatacatggcttcgatcatcttctcatccgggacatcatattcccggtaataagtaacaagaactgccggaagaactccacatgctcccgctgttggcgctgcaacgattctcttcatgcacgcattgttgcaccccatcttcagggcattggccatcaccttggccataaagtctccgcacagcgtgtcccccttttgaagataggcatccatcaggccgccctcttttcccaccagaccgcttctggacaccagattcggatcataagcgtccaggttctcaagcatagactgccacatattcgtcatctgagtccaggattcctcctctgtgacgcctctttcatccgcatcttccagttgcactgctttccagaacggaatcttatccttatcgcatcttaaacgcgcctcttccattgattgatatgacatacgctaatactcctccacttctactctaggttgttccgttcggattcaggaacttcactctgatgattccttccttgctctccaaggcgtcaatcgcctcctgaggaaccacctggtccgtctctaccaccatgaccgcaaatccgccccgcttatcgcggaatacctgcatcgtggcaatattaatctctgccttgctcagcgccgccgctacttccatgatccgcccgggctcgtccacattgcggatgatcagcgtataactttctccactgaaattcacgtcaatgccatccaacttgcagaccttgattcttccgcccccgatggaaaaagcctggatcttcatcgtcggaacgccatccgcttccattacgatctgggccgtgttcggatgggcctccttaatgtccttgttcttaatctcgaattccatgccttgcgctttcgccacttcgaaactgtccggtatcctcatgtcgtccggcatcatccccagcaggcctgcgatcagcgctttgtcagttccatggcctttccccgtagccgcaaaggagccgtgcagatagatcgttgccttctcaggctgcctgccgaataactgtcttgcgatcaggccgatacgcgctgctcctgccgtgtgggaactggacgggcccaccatcacgggtcccagaatgtcaaatatgtttcccatttgctttccctctcttttcttattttgacatatatcttcttctattatacttgggatttacgtagtttacaacgacaatttctgcgttgtaaatctgcttcagatatgctaagattggttacagtctgaaaaaggaagtgtagataatgaacaagaaagaagtactggaaatccgcaagcaattcacaccggagaactgtgcgatcaccaggatctgcggctgctatgtggattatgaaaaagagaaaaaagtggaactgaaaaaagcatttttatccctcccggaagaagaggctttcaagtatttcgatatcttcaagcacaccctgtccgggaccttgggcaagaacctgatcaacatgggattccctcttgaccaggaattagaaggcggcacgcagcagactctgttgaaactgcgggacagcaaactggaagatgacctgcttgtggagcagttctacgataatgtcatcgataactatgactatgccgaaaactattacataatactgattcacgctgtatacgacgtgccgggcaaatcctccgacggactggagatgttcgatgcctccgatacagtctatgagcacatcatgtgcagcatctgcccggtaaaccttaccaaggcgggtctgacctataacgcggagacgaacaatatcgaggaccggatccgcgactggatcgttgaggcccctgcaaaaggatttctcttcccggctttcaacgaccgggcaagcgatatacataacatcctgtattataccaagaagccggaagagatacagcccgatctgatcgccaacgtactgggaagcaccatccctctgacagccaatgaccagaaggccaccttccaggccatcgtaagcgacaccctgggcgaggactgcggctacgaggtggtgcgcaacatccatgacaatatcttcgagatgctggaagaatccaaagaagcgccggaaccattggaactctccaagccggatgtaaagcggctgcttgaaaaaagcggcgtgcctcaggaaaagatggaatcctttgaccaggaatttgaagaagtggtcggcgaaaagaaaaccttcctggcctccaatattgccaacgccaagactttccagatcgagacgccggatgtcatcgtcaaggtcaacccggaacgctctgatctggttgagacccgtgagatcgacggacgccgctgcctggtaatcgcgatcgacgatcacctggaagtaaatggaattgaagtccgatagacatgcctatggccagtaagtccatactgccatcgccggaaactcgtaaaaagcaataaaataaaattttttgtaaaaaagcgaaaaagtatttgcaaaatatattattctgtgctagaatattttttgcgagcggagatggcggaatggcagacgcgctagattcaggttctagtggtggcaacactgtgagggttcaagtccctttctccgcatcatttataagtaggaagaaaccaactgtttacaaggtttcttcttatttttttatagaaactttcacctctttttgttatcgtataaggcagcccgctccttgatcttaagccatacacgcctagccttgacagggtggaaacaccggaagtccccggctggtgcggccattggccaaagagtctggaaaaacccgcggaattttcctgggagaatgaatttaatttctagggcagcatttgattctaaagcatttaattctaaagaaaaccttatgtcttcctgaacattctgtgatatcccttgagtctttctgataaacataataaaatagaaagcgtttcacaaggagggataacatgagtataaataaaaaagactttttcgatgatgatttcgaggtcatttatgaaggcgatctccctgatctgcccgaagagagccatgatgattatgaggacgtgcttcagaagctggccgatctggataaagaatatgaaacctcttatcatagccggaagccccaaggaaataatcgcaatgatcgttttagcgatcacaacaatgattatgatgatgactatgattatgacgactatgattatgatgacgactatgattatgatgacgactatgacgatgatggttccagacggaggtcgaagaaaggccagagcgccgaaagcaaaaagaagaaaaagaaaaggagaaagatgccaaacctcctttctccggtgtccaaaactgccaaagccggaggcaaggcggcctttaagatcgccaatctaattctgcgtgccgcgaccttgatactcattgccattattttctgcctactggctgtcaacttctggaagaactacggcgcgtttggaagcattgccaccgccgtggcacagaagaattatgctctggccgcttatgcagttgtggccgttttcctgctgctcttcgaactgatcaccttcttccgggtattgtccggaagcaagaaaagcggccgcaagggccgctacgtggacacaggcagaggcctgttctcattcctgttcatttatgccggttccttgctgtccgccttattctacggactgatcccggcctcgccgcagcctcttgccggcgtttcgggcgcgctgctggtatatggttcgcttcgtactaccctatttgccttatgcgccgccggggtcatcagctgcctgatccgcaagtttgccatccggtaggactgcactctctggcttagcattcccagactttacaatctcagaccttgcgtcttcttcctccgcctgttccaggaaatccgcgtctttggatttcaggcgggggatgaatcttctggcaaaccgcccttttcccctattcttcacataaaaatatccaattacggaaaataccacggcgccaatgaaatttacgaagagatccttcatggtatccagaaggccaatatccagataacctcccaggcccagactttcgccgttcaccgtcacatccctgatgtttccaattcccaccgcaatgttgctgttagtaggatccagcatgactgaatggatgctatgtacaatggtgtccttctgcatgtccagattaaatatctgatccatcgcgcactcaaaaaattcccatattacgccaatggtcatggaaaagcagaatgcaacgattgccacgaataccggagagagctggatagagaatttcttgctgcgattaagaatgtcaaccagcgcgaacccgatggccgccatcaggaatccatttatcgtatgcagtgccgtatcccagaaagcaaacttaatataatacgactggatttctcccagtatctccgccgcaaatatgaagatcagtatcgttatctccagagcagtgggaagttctatcttcaagttgatctgtaccaggcttggcatgattagcaatatcaatgtaagaatgcataggaacacgttttcataattccggttaaatatctggagtatcatcatcaggatgaccagcatacgcagcactacatatacgacaaaggaactcttatgctccctcaattccatatgcagcgccttgttcattacctttagtctctttcttatcttcatcttctatcctcgtatcccggatcgctagttcaggaagttgtctataatgattccttctgcctcttctgccgtcattccgagagtacgcagctttaccagctgttcgtcattaatcctgccaattgccgcctcatggatgattgccgcatccagatgccgcgcattgatctccggtatggatgctacttccgcatggtccataataatggaatcacactgcacatgggcatggcatttggcatttcctactgccttcggatggaatacctgcctggactgtccttttgccactgagcgggagatgatctgggcggaacttccgtccccattcatctgtatctccatattggactctgcgttctgactgtcatgggtcatcagtttctcgatcacgaagagtttggagtttgcccccatttctacttctgtctcccggaccgtggaatccacacccttaatctggacagtatccagcgtaaatatagcgtcctccttcatatatatcttagtgaccggatttagcaccctggcgccggttccttccccctcgccatagtgtttctcctcgtaccggacatttgcgcccttgccgacatggaaggaatggatcccgtcatgcctgctctcattgcagccgctgttgtggatgccacatcctgcgatgatggttacgtccgcgccagcatcgatgtaaaaatcattatagacttcatccttcatgccagaggcatctaccaccaccggaatgtgcacctgctcccctctggtattcccatcaatgtaaatatcgattccaggcttatcttccttctttttgatcttaatatgctcgctgtccccatgacacagggcaacaccgttgtggcgcaggttgtatgcgcctttctgctggaatcctgatccgtctatctgctgcaatatcttctccgtaatcttatctaataatgccattttaaaatgctcctctcctattctaactccatgcaggcgaaactatcgcccttatcaagcaatgtgggcaggatctcgtcttttggaccgatcgccccgatcttgccgtcttctattaacatgatccggtcagccatctgaataatccgctcctgatgggaaatgaggatcaggctctgttccttcttattatgaatcttctcaaactgctggatcagcatggtgaaactccaaaggtcgattcccgcctccggctcatcaaatatacataatttgtgtggctttgccaggacggtagcaatctcaaggcgcttcatctcgcctccggacaaggttgcgtcaacttccctcttaatatactcttttgcgcacagccctaccccgctgagcattttgcagcattcaggctcggacagttcccggccggctgcaagagaaagcagcctgtctaccgtcattcccttgaatcttggcggctgctggaatgcaaatccaatcccggcattggccctgtggttgatgtcgtaagaagtaatatcttccccatccagcaagatctggccatcatctgcttcttcaatccccatcagtacctttgcaagagaagacttgcctccgccattgggtccggtaataacaagcatctcgccctcgccaacttggaagctgatgtctttaacgatacttctttctattccattttcattcaccttgaatgtcagattcttcacttcaagcatgtcagatacgctccttttttctaattgtaattatctattattaacatatatggtacattataatcttttttcacatttgacgcaacaatctggggcaggacattttcctgcccctgccccggttatcgcccttcgctttatttgtttccatactacttcttctgataatactctgccattttcaaaatcatctattgcctcatcaagtttagtaaaaattttatttacggcatcatctatagtgtaagactactataatagttctttataattgtatacaaaaaaaccgtaaccctccattttacgaaagattacggtccatgatgcggatgacaggaatcgaacctgcacaccgaagtactagatcctaagtctagcgcgtctgccagttccgccacatccgcatgtcaacagattgtattttaatatattatgacagttttgtcaatttttttcgtattatatttcttttcaatataaaatgcggatgatataggaccatccgcatttttctatcttactcttccactctatattttagtagttctccactttccgttcgaaatacgctttgggatatccgcatgtcgggcatacttccggcgcttcctctccttcgtggatgtatccgcactggcgacatttccagccaagaggcgcatctcccttgaaggtcagttccttcttaagagtatccagaatctttaagtaacgcttttcgtgggctgcttctacttttgccacattctcaaatttcactgcaaggtcttcaaatccctcttctctggcttctttggccatgcgggcgtacatctgggtccactcttcgttttccccatctgcggctgcctgaaggttatcagcggtgcctccaagcccgtgccattctgcaaaccacatcttggcatgctgtctttcctgttctgccgtctccataaagatagcagcagtctgttccatgccctcctgttttgcgatctcagcaaagaaggaatatttatttcttgcctgggactctcctgcaaatgcttccattaagttcttctctgtctttgttcctgcgtatcttccggaagcctttgctgcctcctccagtttttcgaatttttccggtcctaccttgcataccgggcaggctgccggcgggttctccccttcatgaatatagccgcatacggtacatctgaattttgtcattgtcttgttctccttttcttctttctcttgatttgcttcgttattttctttatcctgctcccaggcaggttttgtaaattcttttaaaaccattccttccggtcctaagtcttctgccctggaataataggacgtatgcagcatctcttctgctgcctggctcaatggctttccgtagaattcgctgtatactctcttaatatccggattctcatggctatagcgcagcgtcatcttggcatcctttgcatagagcgactctatccttgccttacgcacttcatccgtcatcggcacctgcgtctttggctgtccgccccctccgatgcatccgcccttgcaggtcataacctctatgaaatcataggatttgtcttcctttttcatctgctctatgaaagttctcgcattctcggtaccatgaatcactgccagacggatgggaagcccgcccatctctaccgtggcttctcttacgccttccattcctcgcacaggttcaagacacagataatcggacggaggattctctcccgtcaccaggtaataggctgttctggccgctgcttccatgacgccgccggtatttccgaatatgacgcctgctccggacgccggacccatcaaggaatcgtaagcctcatcttccagaaccccgatgtctattccctcttccttaagccacatggccaattccctcgtggtgatcacgtgatccatgtcccgcatgccctcagatccgtttgctttagcggaaatattcatctccccgcggcggatctcgaacttcttcgccgtgcagggcgttactgccacattgacgattttcttcggatcaatgttgtttttctttgcaaaatatgtcttgatagtcggtccctgcatgccgatcgggctttttgccgatgaaatgttgggaagaagttccggataaaaggtttccgcaaacttcacccatgctggacagcagctggtaaactgaggcagcggcttctttttctccgtaatccgctctacaagttccgatgcctcttccataatcgtcagatccgccgaaaagttcgtatctagaacatagtcggctcccaatgctctgagggccgctaccatcttcccttccacaaaacttcccggagccatgccgaaagcttctccaagacctacgcgtacagagggagaggtgctgaagattacgatcttatccggatctttgattgcttcttttacttctccgtattcatagacctcggtgatggaattcaccggacagacattggcgcattgtccgcaatggatgcagattgccgtatccttcgtgctgaccagatcatagagcctgcctacgccaatttcccgctcgcatacctgacggcactggccgcacttgatgcacaggtcttcatgcctctgtatggccggattatcagcctcaatgggtattctgatctctgtatacttatggtgcatagattctcctttcttatgttaaataatagtaactgttattataattacatatttttacattttttgcaataggaaaacagcatttttttcaatttcttctaatatgggtcaaaatgagataaccatgcaaaaaaaaaaacgcacatccctttcagaatctgcgttcctatatctcttctcctgagcgtgcggggattcgaaccccggacaacttgattaaaagtcaagtgctctaccacctgagctacacgcccataattaacctgggctagttggattcgaaccaacgaatgcaggagtcaaagtcctgtgccttaccgcttggcgatagcccaataaaaaagaaaaaaggtgggtaatgggactcgaacccatgatatccagaaccacaatctggcgcgctaaccaactgcaccatacccaccatatatattacttatcgaactatttatgtccaactaagtatcgctttattcagttttctgtggttctaacgagcctggggggattcgaaccctcgacctacggcttagaaggccgttgctctatccagctgagctacagactcacaagacaaactctttagaacttatctctcttaaagccgccgttacaactactttcaaggctttaagaaagcgggtgatgggaatcgaacccacgtatctagcttggaaggctagtgttctaccattgaactacacccgcatgaatatcggggtgacaggatttgaacctgcgacctcctggtcccaaaccaggcgctctagccaagctgagccacaccccgatgctatattgtccagtcactttaacccctggttctccgtgacacaagagttattatatatgaacgcacccagcttgtcaacaacttttttcatttttttccttctttttctaaagatagtttaccgtgaattccgcgtgcccgctctggtcagtctccatcagcatgtagctgggtctgcgcccttcctggcgcggataggacaggcttcccggattcaaggtgatcaagtcatcctccctggtgattgagggcttatgggtatggccatacatgacaatatccgcccctcttcccctggcctcttccttgaggcgttcttcgctcatagatacatagtagtaatgtccatgcgtgataaacacatggaagccttctataaagaattcttcctcgcccggaaggtcgcagaagaaatcattattgcctcttattatatgcgcaggacagtctgccagcgcctggatgtagtcgtcttctccctccacatctccaagatgtatcagcatatctatgggctttactatctccagcaccttatccagattcttatgcgacttgtgcgtatcacttactatcaatatcttcatatagcatccccgcaatcttcttatttctccggcttcatcttctcctccaggattatccgcatcttcctgagcccttcgcccctatggcttaactcattctttttctccggcgcaagctgtgcgctggtacatccatgctcagggaggaagaaaatgggatcatagccaaatccgttctctcccgcaatctcatgtccaatgatcccttccatagtccctcttacaacctgggtacttccgtctggaaatgctgctccaatagcgcatacgaatcttgctgtgcgcttctcatccggcacgccattcaggcggtcaagcagcgcctgattctttatatcataggaagtatcctcccccatatatctggcggaatagattcccggctccttattcagatagtcgatttccagtccggaatcatccgccaagatcaccgcatccttgtattgtggcattcctgtcgcaatctttgctatctccgtagccttaatcatagcgttttcttcaaatgtgcttccgtcttccactacatccgcctgtatccccgcctctctctgggaaagcacctctgcccccaagtctgcaaatatcatgcggatttctgccatcttatgttcattgccagtggcaaatataatcttcttcatcatcaagccttcctttctccatcaacttcttagcgtctcggcggcctcgggccaaggaactggtagaaataggtcttcagcatcccattatatatcttgcggttcttgtctgccttccttccaaaataccgctctgcctcttcataggaagtaatcatataagctgaccaggaatccagtctcttgaaactttccccgaatgtctggtaaagctggggcaggttttccttctcttccagacgttcgccatatggggggttcgttatgataaacccatatttcttaggatggcttaagtccttgacatccctttcctggaagtggatcagatgccccactcccgcctcctgagcgttctgccttgcgatacggatcactgcgccgtctgcgtcatatccttggatatccacatcgatattgtcctctatcatgtcattcgcttcatttaccgaatcataccataacttacgcgggatcagattggtccagtcttcggccgtaaaagagcggttcatgcctggggcgatgtttgctgccatcatggctgcctcaatgggaaacgtgccgctcccgcagaaaggatctaccagaatccggtccttcctccagggcgtaagcatgatgagcgctgccgccaaagtctctgtaatcggcgcttttcctgacatctcccggtaacccctcttatgcaaggatacgcccgacgtatcaatccctacggtcaccacatccttcatcaggaatacgcgcaccggataagaagccccgtcttccggaaaccactccagccggtagtgctcctgcatccgcctgaccattgcctttttcataatcgactgtatgtcagaagggctgaacaacttgctctttacagaggctgcctttgtgacccagaacttcccgtcctttggtatgtagtcttcccatgggagacttctggtcttctcaaagagttcttcaaaggtcgtggccttaaaacttcctaccttccacagaattctctctgccgtgcgaaggaaaatattggaacgacagacggcatccgcatccccatagaaagtgactctgccgtcttctacttctgcaatctcatatcccagatctataatttctcttttcagcaccgcttctaagccaaagtggcagggtgcaatcagttcaactttattcataaactctcccaacacgaaatttatattcaccttaccatcttactttctttccccatattttgtcaatgattctcgtcctattaggcaatttcttttgcctaaaacgaaatattgcaaggccgacggtatatcgcctgccttgcaacattcatttttcttcagtctaatccaattacaatctaatctctaactagtagttgtcgctgtagtttgaactgttagaattcttgttctggttagatgcattcttgttggatgcattctggttagatgcgttcctgttggatacattctggttagatgcgttcctgttggatacattctggctagatgcgttcctgttggatacattctggctagatgcattctggttagatgcgttctggttagatgcatttgagttactgttagatgaattataatttttagccatgtcaattcctcctaatctttttggttacgagattattatgtccttgacaattttttttatgtatcaattttcacaaaaatgagttcttaattatattaagaattttttaatttttaacttgcttttcaaatcgttctatattatactaaatcatgtagaaaggatactttctacaaccccttattaattatttatactcccctcaaaagaccgatggctcccccatcggtcttttacttttttattttgttctattttatcggcctcatcgtcggctgccaatgatcctgaatacgataatcataaggatcaatggtacaagaatcggcgcaagaagactgaatatgcctccaattacagcgataaccagcataaacacgccaacaattcccagaaccagaagcaatttcttccaccaggtatccagaccgaatatatggacttgtcccgtcccgctctgctgcctctgatcataattctgcctattgggctcgtatccgtaatcttcctgggtattcccctgtatctccaaagactctatgatcgtgcgggcaattgcccatggatctcccagttccgcaacgacttcttcctcgcttcttcccttcctgacctcatcagcgatatagccgctataatagttaacattctcctgtattaccggaccgctcaggtcatttgccaaagcctcctttaacttatttaaaaactcgcttcttgtcatgaacatcctcctacatatgcatcagacggattcccggccgtagccgtaccatatcttaataagtaaaaaccttgcacttagaatatcacatccctatgtctattccaagtccaaggttcttaaatttttctaatctctttattaagatgttatacctcgaagatcaggtcgccgtaggatggcatcggccatgcttctttgtctacgatcatttccagttcgtctaccggcgcacgcagcgcttccatggctggtactgcgtcagaatgatagaaccttgcctggtctgccccttcctccatggaagaagcctgatccgtcaccacaataagcgcttccaaagccttcttcgtccgagtcaagagcgaggatacttctgaaagaagatccgcctgcacggatgcgtccgcgccggcttccttcacgctgatcaccgtatccgcaagcgtcttcgtgtatttgatgactgccgggataatctgcttgcttgccatatcaatcatcgtgcgggcttctatattgatagcctttgaataattctcaaacttgatctctgcgcgggattccagttcagccctggtaaataccttgaattcttcaaacatttttatagtcttctccgtggtaagcgccggaatcgcctctaccatggagcgaatattcggaaggcctcttcttcctgcttcttcgacccattcatcagaatatccgtttccgttaaatatgatgcgctgatgctcatacgcgtatttcttgatcagatcatgcacagccatatcaaagtcatccgaactttccagcacatcgcaggcttctttaaacgcctctgctacgatcgtgttgatcaccacgtttggcccggccacagagtcacgggagccaaccatacgaaattcgaacttattgcctgtaaatgcaaatggagacgtcctgttccggtctgtggcatcctttgccagatccggcaacgttctgacgcccgtctccagttttccgcccttaatgctgtgtgtggcttctccggtaacgaccagctgctcgatcacatcttccaactgctctccaaggaatacagagatgattgccggaggcgcttcatttgctcccagcctgtgatcattgcccggatcagccgcagactcccgcagaagatccgcatgttcatccaccgctttcaagatacacgtaagaaccagcaggaactggatattctcatgaggcgtctttccaggctccagcaggttcttcccgtcatccgtgataagagaccagttattatgctttccggaaccattcacgccagcaaacggcttctcatgcagcaggcatttcatgccatgctggcaggctaccctcttcaatgtctgcataaccagatggttgtggtcgactgccacgttagccttcgcatagattggagcaagttcgtgctgggccggcgctacttcgttatgctgcgtcttagccgtcacgcccaccttccacagttccatgttgacatctttcatgaatcctgcaatcctctggcggatcgttccgaagtaatggtcatccagttcctgtccctttggaggcatggcgccgaacaacgtgcgtcccgtatagatcaggtctttcctctcctggaacttcttggcgtcaaccaggaagtattcctgttccggtccaacagatggagtaacttttagggatgtcgtattcccaaataaacggatcagccgaagtgcctgttcattgatcgcttccatggaacgaagaagcggcgtcttctggtctaaagcttctcctgtataggaacagaatgctgtaggaatgcaaagcgtggctccggcagcatcgtgccttacaaatgcaggcgacgtacaatcccatgccgtatatcctcttgcctcgaacgtggcgcgaaggccgcctgacgggaaagaagatgcatccggctcgcctttgatcagttcttttcccgaaaagctcatcagtacttttccgctctccagaggggcggagatgaatgagtcatgcttttctgctgttacgccggttagcggctgaaaccagtgagtgtaatgagtagctcctttttcaattgcccattccttcatctcatgcgcaattacatctgctgtcgcaaggtctagttccttgccttcttcgatcgtccttttcagatccttatagactttcttgggaagccgttcctgcataaccgtatcattaaaaacgtcttcgccaaaattgtcagctacatttaatgcttcactcatatctttacgtttcctttcttatctgtcttagtatgaattaatatccgtccctccggaaattccagtccggagaataattagaaaaaggcactccaacttctggttggaacgcctttgttctctttacgcctgtcagtatacctcaatcagccgaaaaaggcaagtaaaaatttcgttcttcagcaattaagcttttccaactgaaccgaataattccatcttttcctttacagtctgcataatcgcatctacgcctggcttaagaagcttgcgtgggtcatagccctttccttcaaggtcttttccagcctcgatgtacttgcgtgtagcatccgcaaaagataactggcaatctgtattaacgttaatctttgctactccaagatcaatcgccttcttaatcatgtcatccgggattcccgtgcctccgtgcagtaccaatggcatctttcctgtcagtttctggatcgcgtccagagtctcaaaacttaatccggcccagttctcaggatactttccatggatattgccgattcctgctgccagcatatcaacgcccagatcagcaatcatcttgcattcctgaggatccgcgcattctccctgtccgataacgccgtcctcttctccgccgatcgctccaacctctgcttcgattgacattcctttttctctgcagatggcgatcagttcttttgtctttgcaacattctcttcaatcggatatttggatccatcgaacatgatggaagtaaagcctgcctctatgcacttcatgcatccgtcatatgtgccgtgatccagatgtgtcgcaaccggtaccgtaattccaagttcttcgatcatggcagctaccatagcggataccgtcttgaatcctgtcatatatttgcctgcgccctcggacacgcccaggataacgggtgacttgcactcttctgctgtaagaagaatagcctttgtccattccagattgttgatattaaactgtcccactgcatagtggccttcgactgctttttcaagcatctcttttgctgatactaacatataaaactcctccaattcctctaccttgacaagatgccttgacacctgcacggcatgtattaagtttcgcttttcttattatatctcattacccgggaaaagacaagatcaaagacatccttaagtttcttggcatttatccttccagcagccggctttggccccgggcatatgccacgccgcctgaagccctgatcctgtggatcacatcctgcgtgatcactgcctcttcttctctgagttttctccacaattctttcagcatcatctggatatccctgacatcactgaagccgcagataaagatgcagaactcgtcgcccgaccttctggacacgagccagtgctcctggggcagcccctttagcaaaactgcgaaactctccagatatttatcgcccacgtcatgtgctttatccgcaaaggcaaaaaagcggacagccagagctgtccgcttttctatgcctgctattctattgtaatgctccaaaagttcacataagactttcccggccaaagtcttataagatcgcttttatactggaagtcttccacgactccctgcctggatggaagggacgtccatggctcgatacagacatacggcgcgtctgtattgggcacatgccagagtccgagataaggcagatccggataggctacccttacctgccggcttcccttatccgactttaatgcgacctcgtctgccatatgcgcaagcacgatcgcgtcatcgtcaaacagatcatggctcagcctcaggatctgtccatcttccaatggaaattcttcattcatgccacttaaaaagcaggccttcgtatgccccacccggtccgggcggcactcttttgcgaattccaggtagtaatcttcaaaatccagtccattctccagcggaactcgaaaccccggatgccctccgattccaaaatacatcatcttatctgaaaggttccgtacctggtacttaatctcgatcttatttttctgcagcgtataagatacctgcaatacaaaatgataaggataggatgcatacgtctcctggctgtccctcagttccaaaacaatcttttcctttgtctgctccgttacctgaaatggaagtttccgggcgaacccatggatatccatctcaaactcctgcccatccagccgatacttgccctccgtgaatcttcccacaaaggggaatagaagcggcgcacgctccggccagtattcttcatcgccgtcccataggtactgcgcaccgtccttttcaatcgcctgtatctgcgcgccgcaggaagccaccagcaagcggaggcatccgttatccagctgatattccatgtatccgcctcctgactattccgcctgcggatattcgttgcacagcaggcggtatggcgcttcgtcctcctcgattgccgggaagcgtcccacttctttattatagaagaaattatcattatcatcgtcgttgcacatggacacttcgcccagaaggaccgggccgcctgtctctggcacgataaagtcatggtacatatacggcgtaatggtaatgctctgtccgggcttcagaagtacttttgtgcccgccgggacctggctggtctttccatcggagcatacggtcacatccgtatccagcatcctctcatccggtgtcccgttgtacaccgtaatatagacatcattgccgcctctgttgatgatgtcttccatcttgctggcatggaaatgcatcgctgccgtctgtccttcatagagcatcagaagtttctccgcataagtcttcttatatttctccggcatcttctggttgccgttacggatcgtaaacagtgagaatccgacctcatcgaacttgccaaggccaaagtccgtaatatcccatcccagcttgttgtcacggatctcatcgtattcatggccaatgtcctgccactcctttgccgtccatgccgcaaaaggcggcatctcaaacccatgctccttgattaattgctccatatcttttataacctgattaattcttgagcgtttcatagtaatatttcctcctccatatatgctcaaatagcagagtacggattataccttatattctgataatatcatctctggcttgtctgcctgcgtagtcttgatcaattcctcattcgtgacaaagttaagaagcgcgtcgatcaccgcggtctcattcatatgggcataccctttatagaagctgaacggttcttccttgccggctgatagaagcacataatctgcaagattcgataccggggactgggcaaatgccgtgatcgctatgctcttaaggcctttttcttttcccagttccagcccctggatgacctgtctagatgttcccgactgtgatatggctatcagaaggtcatcctggtccgccagattcacatgattcatgaagtattcggcggcaacattatatgtgctcttgattcccagccttcccagcctgaatcccatatactgggccagagggcatgtatttcctacggccatgatatgcgcctccttgcaggtcttcagaagattcacgcagttccacatcacatccgcgtcaatccttgagccgatggcgagcatcgtctgcgcatactcctggaacagtttctccacggcatccctgctttcagccagcgccgaactgccatactgcttcttccccagatccctcgcaagggaaatacggaactgataatatccggtatagccgatatgatggcacatcctgactacggtcgcatcgcttaccccgctttgcttcgccagttcggatacgttagaatccaccgctttctgcggattctgcaatacaaagtccgccactttcctttccgccgaaaagatataatcatactgctctttgatgacttcgagcacctctctgtccagaatgttctttttactcaactttgacacctcaaataatatgtattagtacagagctgcctttccatctgcctggaataattcaatcttatggaatgcaacttctttcattgctgcaatgcatggcggctggatcgtattaggctctcttaagcctttgtcagctagtacttctctcattttatcataatatgccacttttatgtcacttgaaatgttaattttattcacgcccagcgttacggactgtccgatctctgcatccggattgttagagcctccgtgaagtaccagcggaatcgatacttttgacttgatctcttttaacagatccagcttcagttccggcttcattccctttggatagatgccatgggatgttccgatggcgatcgccagcgtatcaacgccggatgcctccacaaactttacggcatcatccgggttcgtatagatgatcacattcgcgcctgcttccgcttccgcatccgtagagccgatcgttccaagctcgccttctaccgatacatttaccgcatgagccgcctctgccactttcttgcatgccttgatgttctcctcgaacggaaggctggagccatcgatcataacggatgtaaatcctgcctggatggcggtcatcacctgctcgaaagaagcgccgtgatccagatgaatgcaaaccggaaccgttgccttgtgcgctttctcaatgatcgcttttaccatgtctgtaccaatatggcttaactcgtcagggtgaatcgcaatgattaccggcgcattcttttcctcagacgcttccatgataccgttaaacatagaataatcactgatattaaatgcaggtactgcaaaattattctcgtttgctaccgccaacaattccttcatattcattaacataattctcttcctccataaaataatattttttatacttgctattctagacctcaaaataggccatgtcaacattcttatgaaataaaatttctttttctaacattttacaataaaattctatttcatactcaaaagcacatctgcacaccgcccacaaaggaatctccaagcccaatggtatacttcggcttgtcaatatatttggatggtaccagcgttacttccccggcaaacgggctggctttcaccttctcatagttctctacgccctttgggcttagttcaaagcccagcacttccaggatctgttcctttgtgccataccagccgttctgcgctttggctgtggcaagcagattcccatagatgagtcctctctcaatatccgccttcaaaggatcgcctacatacatggaataatcctttgtatggacgatgactcctttttggatgccgaatttcccgcggatgaatctcgcgccctccacgcaggagatgatatcctcgatgtccacgtcaaagtcatacatctccttcaacgtatacttcagttcctcttcattcaggcttacgatgtccacgcaggaatacacggtttccaggcatagtttccggacggcatagtcatggtaatgcgcatcctcaaaaaatacgattccatccggattcgcttctttgtacttcgccacatggccttttacatattccagatgctcttttagcacttgcggatctaacagcgcgttaaagctggacagcacattgctgcttatgtccatcccgttgcgctctatccattcaaaatagggccttgagaaggggacgaactcattcacggtaatcttcgtgatgatcagcctgtttgagcagggaatgacagcctcctggcctcccaggcagatcttatctcctttcttgaactgaatgataaaatgaatctcctgctcattcgtctggatgacctcatccgtatgtaccagccttccatcctgggaaacagcatagatagacggggatctcaggatctggcagacttctttggaatcgtccgtcagatggacgatcgacgggcagccaagctgggccagagccatggcagcctgtactgccgtgcctcccattccatagtcaaaatgaaaactctcctctaccagcttcgtattctttacatctgcctcgcccccgattccgcggatacagtaatacactaccgtccccagaagatcctccatcgtctctatctcgtccgacaccttcatctcggacagcacgccgtctggcatataccgctccagaagctcgtttagccgctccactttgaagtcacacagcagatccagattactggtgtatcccagcgccgtatagcgcccgttcctcgtccgttgccgcacggtctcctcaagcgcttcatatgcctcctggtacttctgttccaacaccatctttctcacctcttttctttagtccattaacgcaaaggacctgatcttgctttttatcacctcttttgctgccgcttctgccggcccccacaggttctggcaggaatatttgaatccctccgactgtacggtcttaacataggcttcgcccatggcaacctggatgtccgtgcagatatttaccttgcgtattccctgacggatcgcctcctgcacttgttccataggcgtacccgagcctccgtgaagcacgatcggacagtctacagccttcttaatattacgcagcctgtctatattgagttttggttcgaatgtatattgtccatgggcagtcccaattgatactgccagcgcgtctacctgggtctctaaaacgaaccttcttgcttcctcgggatctgtctgtgccgcctccggccccttaacgatgatatccccttcttcgcctaccagccgccccagttccccttccaccgtgattccgtatgggtgggcacgccttgccaccttgcgggtgaggacgacattctcctcataaggcaacgccgacgcatcaatcatgacggaagaaaatccagcgttgatcgcacgattgcagtcttcaaacgtagtggcatgatccagatgtagcgccaccggtacctctgcgtctttgcttgccatatatgcggtctgcaccgtctcctccattccgcccatccggccaatctccagcatgccgcattgaaggatcaccggaacgtccagttcctgtgcagcctccacgacagcgcgggccacttcgaaagaccagaattcgaatgcgcccagtgcgatgcccctttcatccgctattttcaatgcttctttcattggtacaaaattggtttttaacatgattactctcctttaatgttgtaaaataactgccgttttatagatatacggccctcagttatgctataatagtactagtatttgcgacatccctggcatgacttgaatttataattctatgagaggtacgattcaatgatttatgcagaagaacgttataataacatcatgcgtctgctgacggataagggacgcatcagttctgcggaactatcttccgccctgaatatttccagggagacgatccgccgtgatttaaaccgcctggctcaggagggccgccttgtcaagacaagaggcggagccatccttccggatgccagcctgacaagcctagactttccatacactgcccgcgagaaggctaaccgaaccgagaaatccgacttatgcgcctacgccgccagatttattcaggagcgggataccatttttctggacaacagctctactgttacgcatttgatacgcttcatccccaaacagtatccgctgaactttctggtttactccatttctctgctgctgacgctctcgaacatgcacaatcccaactggaatgtgttcagcctgggcggcatgctcagctatactaccatgtcttctacccggacgcttgccttatccgccctggataatttcatgcccaccaaggcatttctttcttgtcacagcattaccagggacttttatgccaccgacagctacatggaagacgtggaacttaaacgccgcgccctggatatatcagcggagaccttccttctggcggatgcctccaagctaaaccaccccggagtcatcaaggttgcatcctccgtcgagtttgaccatatcatcaccaacgagaaggccgcgccattctttgtgaatgacttaagggaaaacggctgcaacgtccatcttgcccctcatatcacgaagtaagaagccttccttgcttttctacataatccagaaccatctgaaaatccggcatgccggtgctggcgcccttcttagcgattctataggcggatacctcgctggcaaagcacccggctttctcaagattccagccttgaagatagaagcacaggaatcctcccataaagcagtcccccgctccagtggtgtccgtcacccggattccgggatataaaatccttaacggaaacttccggaattcctctataatcccgtaaatgtcggatctctgcgccagataggccgcctcctcataacttggtatgaatatatccgtctccttaagggtcttcttaagcaggtccatcttgcacctggggccgccggtcagtgtaatgctggcatccattgccgtaatctttccgtagtcatgggctcattgtcgcatccggtacatccccgcttcttagcgtctggtttctacctggttcctgtaaagttcttcaagcaagaaccggccattcatatctttgccgacacttccaatcaaggccgaggtatcccaagccttgacaggaccaccgagaccgtcagggcatccccaccgacaatactttcatctcttcatcccctttttaaaaaagacccgcaaaacccaaagcgcgacacgggagccttccccatcttctttgctgttttgcagagccttgcaatttgcgtaattcgtattaattctttactgatcctgctgtcatacctgcaataaaatatctctggaagaagaggaataatactaagatcgggagcgagcccaagacactcatggccatcatctggctccactcatacgcatgctgtcccatcagcagattgattcctaccggtaccgtacgcatattgttggtcttagtcagcgccagcgcgaacagatactcgttccacgcctgcatgaatgtatacattcccacggaaaccagtcccggaacggatgtgggaacaaggatcttccacaacgccttgaagcgggagcctccgtctatcataactgcctcatccaactccttcggcaaggtattaaaataccccgtcgtcatcagaatggcatacggcagcgtaaatatcagatacgtaagaatcaatgcccaatatgtattgtacagcttgatcgtaacgatcaggcttaagtacggtatcagcagcgtaatcggcgggattgcctgtactgcgacgataatggtattgatcgtgcttttgccccggaagttgaaccggctgaatgcataagaagccaggattccgatgaccagggtaatgactaccactgtaagcgcgatcacataactatttacaaagaaccggaccttttccgggtcggtcaatactgccttataagcatccaggctgaaagtcttagagatccaagtaggcggccaggcaaatatttccgaattgggcttaaaagaattcaggatcatccacaggatcggaaaaccagcgaataatgccccgattaccagcaatataataattacgatctttacccatagttttttctttccaatcatatttaatccctcgctttctgctgtctgacatagaagattgctatgattgtacatacaacaagcagaattaccgcgccggccgaggccatggagtactggtacttcgtgaagccttgtttgtatatatacgtactgatcgtctccgtcgcattaatcggcccgcctcctgtggtcatccagattaatgcgaattgctgcaatgtccatacaaagtccagcataagaaggctgactaagattggcttaagctgagggatcgtgatacgcgtgaatgtctgtactgcattggctccatccagggcggatgcctcatacagatctgtggatattccctgaagtccggccaatatactaatcatatagaaaggatatccggaccatatattaataagcgtaaccgcgaacagcgcaaactgtctggaccccagccattcgatattctggctgatcagccctcctgcctgcagcagatagtttatgatgccattcgggttcatcatcattttccacaatattgcaataacggatgccgtaaacatccatggcagcgcatagatcaccctgaagatgccctttgtcttgttcccaaggtagcgcgtgttcaggagcattgcaaagaacatgcctatgaccagatgcgcgataatactaatgattacaaaatacagcgtgttcttaatggcaaccagaaacgttggatctgtcaataccttcgcaaaattctctaagccaacgaaagttggattcttgttaataataacgttatcaaagaatgaatatctgataaccatgataatcggtatgatcaacaatatgagcataagaataatggttggcaatagatatacgtatggcgttacctgctttttaaagatatcggaacgttttcctgccggtgtcgtcataactttattttttcctttcgtcaacttatctcaaccccttcatttaggatgttagggctgtacgcagacacgtacagcccatatttctttgtcacttatgttctatttgccagttcttcttactcgaatgcaggctcccaaatatcctgggttgcttttagcatatctgctgcagaggatgtatctccgtcaagatacagctgtaactgctcgtcaaaacttctcatcaggtcttcagatgttggaagtcccgtaaattcgttgatcgcgcggcactcctggaagaggtcgtatgctttctggaacagttcgtcattcttagagtagtctggctctgccgtagagtttcctgggaatgcatttgccagttcagacagttttgcatttacttcaggactcataagatactcaacaaactgcattgcttctttcttgttctcgcagttatccgcaataccgattccccagttggcaacatccattccgctctctccgtcaaaaccttccattacagggagcttcatgaagtcaaagttcagatccggcgcgccttccttgatggttgtaaggtgagatacgccatccgtcatgaatgcaacacggccattggtaaactcttcaaccatatcggattccttcattgcataagcgccttctgcgattacgcctttgtcgtttaactctttgacgaattcaaccgtcttttcaaggtcagcgttacctgtaaggttcggcttgccgtcttttagcatggaaccgccggatgcccacagccagctcatgaactggttctggatgccgcttggagactctgttgacaatggaattgcccatcctgcgatgctgctgtcatatttcttaacagcctcgcatgccgtgatgaactcgtcccatgtcgcaggaacctcattcacgcctgctgctttgagaatgtccatgtttacatacattggatatgcaaaattaactaccggaatcatatatgtatttccttcgtacttaatctggtctgacagctggctgtcatcatatccgtctttttccatcagttcggtcaagttcgcgatggaaccttgtttcgcaaagtcgtatacccaggatccgtcaaggcctactacatctgccatggtccctgctgccgcgccggctgcaatctgagtcttggtatccgcatatgggttgcttaagagtttgatgttgatgcctgtatctttggtgaaatccttacagatatcatccagagcgccatccggaagttcaactccccaccactgctggaactcaagcgttacgccgtctttgctgtcgccgccctcgtcttttgagtctccttttgagccgcatgccgcaagtgataataccattgcgccaacaagtgctgccgaaagcattttcttaactgttttctttttcataattgctcctcctttaaagaaattttttttcagcaattgggcaggcctgttttgtaatccctttgtgcaaccagtttattttgtctaatatgacaatttttccaagccttttttcacaatcgcttatgccttttgtataaattcattataaaataatatttcataatgtcaatagttttttgctatttccactaaaaaccataattttgcacaacttctgcaacccatatacatgcaaaaacacaaaaagccacgctctcgcgtaactttttttcatgtattatcaaatttatcatgctttttgcattgtaaatgcgaacgtcctttatatgaacaaaaaaataccaagaatcaacaaccgccaattcttggtatccttattcaagtgactcccaggggaatcgaacccctgattccagcgtgagaggctagcgtcttaaccgcttgaccagggagccatctcatatcgtacttgcctattatagcaaacaaatactaaacaggcaagtactttttacatattttttcaatttttttatccgaatatcatgcttgcatatccctggataaaaatgaacagcacgatcaccggaagcacaaacgtaagatagaatcttactcccctgttttccggcactttcaggccttttcccgcattggcttccttaataaagttgtcccatccccagccatatctggtcacgcagaacaataggtacaccagggagcccagcggaagcaggttattgcttacaaggaaatcttccatatccataatattcttgccgccgatcgtaaatcctgcccagtccgtcattcccagaacgcacggaatgccaagcagaatcagcagcacgccattgatggcaaccgacttcttcaagctccatccccacagatcacgtccatactggataatattctggaacacggcaatgatcgtagataatgcggcaaatgtcatgaagaggaagaacaaggttccccacagccttccccccgccatctcgcgaaatacattgggaagcgtcacgaacaccagccccggcccctgtcctggattgacgccgaacgcaaagcatgccgggaagataatcaggcctgccacgactgccacaaacgtatcgagagcagttatgctcaccgcttcgcccgcaaggcttctctctttgccgatataacttccgaatatggcaagagagcccgcgcctacgctgagggtaaagaaggcctgtcccatggcggcgaatactgcttctttgattccgctttctgccatcttcccaaaatccggaaggagatagaacttcagtccatccacggcccccggaagcgttacggctcttacaaccagcacgaccataatcacaagaaggcttgacatcataatcttcgttatcaattccacgcccttttgaagccccatggagcagatcagaagtccgatcacagagatcagaatcatccagaatagcatctcattgcggtctccggtcaaccgaccgaatatattctctacctgcttcgtatccgcccccttaaactctcccttcgccatcttcacaaagtaagccagcatccagcctccgatggtggtataaaacatcatcaaaaggtagttggcagccatagaaaaataccggaatatgtgccacttgcttccttccggctccaatgcattaaaggacatggcagaacttttctggctgcctcttcctactgaaaattccataactactattgggagtcccagaatcagcaggaagaacagatacatcagcacgaatgcccctcctccatattctcctgttatgtacgggaaacgccatacatttccaagcccgatcgcacatcctgccgagatcaatatgaaccccagcctggaagaaaacttctctctcttttccatactcttatccttttcttactctatcatttttacagattcatcttgggtatcttccaacagttccggattagacatcagttccctgatatgctcctcgggaaccataatccgaagctgcctgttcaggttctcaaccgtaacctcatcgtgggcgcctccaaattcgccgtccagcgtccatggaatctcttccagggattcaaaagtaatgcgcccggtcttgaaagaatacatatgcttggtatccacctgctcgatgagaagggatgccacgatctcctgcaaggcaagcggattcttcggcgtcttaatcaatgtaacctcgaacaggccgtcatcaaagaccacctgcttgcctatcatgttgcggaagccgcctaccgaccgtgagttggtcaccattccgaagatgaattcatcttccagcgtctccccatcgtgggttaccttgattcggtaggacggcacattaaacagacgctttgttccctccagcacatacgccagatgccccagcacattcttcatctcctgcttcgtctgataggaaacatccgtaaaaaggccgaacgccgcaatatacacgaagatatcatcattaaattttcccacatcgcagggaaacagcgtgccattcaccgcattatccgctgcccgaagaagtcctttcgggatatgcaggctattggcaaaatcgttggttgtgcccgttgggatatagccgatgggctcccgcttgtctctctgcatcatcccggttaccacttcgtcaatggttccgtccccgccactgcacactaccagatcatattcgtccgaatcgtactctgacaccttcctgtatgcgtcccggtatgactgggtgggataggccaccacttcatagcccgcctttacgaatatgtcaataatatccgatagttttggcttcagaagttccttccccgcatgtggattatagataaacagaagacgtttcatgattcgtacccctctttcttccaagttctttttcctatatcataaaaagggcatccccctgccctttttacgttgcttgattatgtattatttccgggtagtcaggaaaccttctacgccggcaactgcctccttttcatcttttccctctgctactacagtaatgtcctcgccttcctgcaggctcaggctcatcatccccataatactcttcgcattaatcttcttatcctccatctcaatgtatacctggcttgcatactggcttgcttcctgtaccagatgcgcaaccggacggtcttccattgccatgttctttttaatagtaacaggtttcttaatcataacgaattgctcctccttactgttcccttaacttttctgctatttcacttaatttccttagtcggtggttcactccggatttccctatcggattctccagaagccctccaagttccttcaacgttgcatccggatatttcagacgcgtaagggcgacgtcttttaatccatcgggcaacttgtcaaaaccgatgttgtctcttatatatatgatatcctccatctgcctgaccgaggcagagacggttttgttaatgttggctgtctcacagttgaccttgcggttgacggtattgcgcatctctttcatgatcctgacattttccagttccagcaaggccacatgggcctccataatgttcaatacgtctacgatctgcgatccttcttttaaatataccacataggatttcttccgcttgacaatcttggcatccatctcgaaactgttgatcatatttcttaaatactccgcctgcttaagagtcccgcatacaatctcaaaatgataggacttatccggatcgctcatggagccggaggcaatgaatgcgccgcggatatatgcgcgcttgcagcatacggcctgtacaataacattctccaccgccagaagttcttctcccttggcgcggatataataactgcagcttcctttggctgtattcctgcgaatcgcgatatcagtacttatattaaatgtttttcccaataatgtaaagcattttcttgcaactccatcattttccgtgtgaagtttcaatatgcagctcccatagccatctttctcaaaagagccggacatatggacaagcgcagacagttccgcaagattgcagtgtcttgcctttgcataatgctgtgctagttcttcctttatctttcctgaaaatgacattttacgctcctactttgcctttgtgatcgcatccttcccgatatcccggtgctcgatgcggattccataattctcattcttcagcagggcctcgtacaactcgtttgccagcgtcaccgaacggtgttttccgccggtgcagccaattccgatcatcagccgggtctttccttcccggatataattggggatcagaaactctaccatatccaccagtttctccataaattccgaggcattgccattgttcatgacataatccctgacttctctatcattgccgcttttggggcgtaattcttctatataataagggtttggcagaaagcgcacgtcaaacaccagatcggcctccgccgggatcccatatttgaatccaaacgaaagcacggatatatagaggttcttatactctttattccggacaaatatcttgttcagttctgccttaagttctctggtcagcatgttgctggtgtccacaaggtagtcagcccgcttccttagaaaagccgtccgctccctctccttttcaatgccttccctgaccggggcatcatttcctgaaagcggatggcttctgcgcgtctccttataccgtttgatcaatacgtcatccacgcattccagatacaatatctcgtacttcatgccagccacatccagctggcccagaaccttctccagttccgaaaaactctgaccgctcctgatgtccacccctatggccgctttgttgatctccgttcccggtaccctcagcagatctgccatcttaggaatcagaggcaccggcagattatccacgcagaaatatcccacgtcttccagcattttaagcgccgtacttttgcctgccccagacatccccgtcacaatcacaaatctcatcttagaactctcccagtctctttacttccggctccagccttacgccgaacttttcttctacctgctctgacaccttacgcatcagttccgccacatccgcagctgtcgcattgtccttgttgatcacgaagccgcaatgcttcatagacacttgggcgccgcctacgctaaagccctgaagtcccgcatcctgtatcagtttcccggcaaaatatccctccggcctcttgaaggtgcttccggcgctgggatattccagcggctgctttgtgatccgcttctccttcagttcatccatccgcgccttgatttcctctttttcacctttttgaagacgaatcaccgcctccagaacgatatagcctttctttgcaattatgctggtccggtatcccagttccagcttctcatccggtatggccagcacttctccttctggcgtaaggactgtcacttctcttagcacatccttcatctctttgccataagcccctgcgttcattacgcaggcgcctcccagcgctccgggtatcccggcggcaaactcgaatccggcaagcccggcttccagagccttgctggcaatggctgaaagaagcgcgcctgcctgggcctttaccagttctccttctatctgtatctggctcatctctttgaatatctgtatgatcactccccggaatccttgatcggacaccagaagattgcttccatttcctactatataataggggatctccctctccttgcacagcccgacgagcccctgtacctcctctgctgtcttcggctgcacgaagaactctgccggcccgcctacccggaatgtggtatggttcctcatcggctcttcaatctgtatttgttccttcgatataatatttaataattcctgataaaaatcctgattcatatcatactccatctctaacattatatactacttaatttctccgtacatcatacactaaatgacttacaaattcaacgcactcttgcaaattccccataaatgcggtatattagtgccaagtaatttaaaaataaaaaaggagtgaacttatcaattggactcgagtgacgtcacacaactcattatcctactaattctactggggctgtctgcattcttttcatctgcagaaacagcgcttacaactgtaaacaagatccgcatccgcagtttggctgaggatgggaacaaacgggcaaaaacggtgcttaagattaccgacgattcaggcaagatgctcagcgctatcctgatcggcaacaacatcgtcaatctgtccgccgcctccctcaccaccagcctggcatacagttttggcggttccatggtggcaattgccagcggaatcctgaccgtgctgatccttctctttggagagataacgccgaagaccatggcaaccatccatgcggaaaagatggcacttatctacgcgccgatcatcagcatcttcatgaaggtcatgacgccggtcatctttatcatcaacggactatccatcggagtgctgttccttctgcgtgtcgatccgaacgcaaagaacgaccttatgactgagacagaactgcgcacaattgtagatgtaagccatgaagacggagtcattgaatccgatgaaagagaaatgatatataacgtgttcgatttaggcgatgccaaggcaaaggatgtcatggtgccccgcgtgcacgtgacttttgcagatgtcaacagtacctatgaagaactgcttgatattttccgcgaagacaaattcacaaggcttcctatttttgaagatactaccgacaatgttgttggtactattaatatgaaggacttgctcttatatgacaatacaaaggaatttcatatccgggatattttgagggaggcttattttacctatgaatacaagagcatctcggaattgctggtggagatgcgccaggcttctttcaacatcgccatcgttctggacgagtacggcgagaccgccggcctgataacgctggaagatatcctggaggaaatcgtcggcgagattcacgatgaatatgacgagaatgaggaagacttcgtccaggaagtaaccgagcgcgagtatattatcgaaggctccatgaatctggacgacttaaacgatcggctggatctggatcttaattcggaggaatacgactccttgggcggctttatcatcgagaggctggaccgtctgccagaggcgggcgacagcatcgtgaccgaggaaggaatccgcatggtcgtagaaaaactggacaagaaccggattgagaaggtacatgtctaccttccagagcccgttatggaagaaactcatacagatgactaagaatcacaagaacggcatagccttttcgctatgccgttcttttatatcctgatatgtccttattattcttggtcttttacttcttccccggcaagcttcaatatatcttcaatctccgcttccgtgattcccagcctgtccgccacttcctcgacgcttactttccgccctaactcctcgctcatgcccttgatcgtctcgtccagttcggacactctctccaccatcttcttatcctgacgcctggtctcagtctgggattccaggagcgcctgcatcccggcgcgcaccgcttccatgacagcctcttcatcctcctgcccttccttacactcatcaagcgccatcatcaggctgatgttgccttcctgaatcatatctccgacaaatatctccacgtgatgcatcttcaatgcctcgtccacgacctttggaagataataggacatccgcgcttcgtcaaggctctttccctgcatctggtcaatatcctttaagtattcctcaatataggactgttcttcattgctaagggatgccggttcctcttttcgttccttgactgtgccgcttttggggacatagccggttaccgctatcttttgtgccagaagatactcgcataccaaatctacctgctcctgggaaaggcggtcttcttcaaagtacagttccacgtcctcaagcgctatcttgccgccccgctcccgggccgcgctaagtattccgcttaatttttctttaaattccaatctatcagccatgcttcattcctccagtacttatttctaatggaatatattatcatagttatctgccctacgtcaaaaaaagagctgcttttggcaatccaaaaacagccctggtctcctgtgcatgatagatattccttagacttagcggacaataaccgttggatatcctgcccgcttcagacgcctttccatttccgcggcttcattcagattgttgaatcccccaacctggacccgcagatacggtccggagtcatcaataaacgccgggtagtcctgctccagaagttcattcagcagccgctccgcatacctgcggtttctaaaagcgcctacctggacccgataataatcgttctgtatgactcccaccgattccagggtatccagaatccctgatgcgatcgcctgcgcaatatcatcaaagttatcgtcaaacagccggttatccacattcgagtcgataaatcctacttctaccagcactgccggcatccgggtccttctaagcaccaccagatttggccgggcttttactcccaggttcacgaagccgatcgcctccagctggtcattgatatcctgggccatctgatatttgatccctgacaggtcgtacaccaggctttctaccccaaaaacctcattgtccgtaggaaacgagttcctgtgaatggatataaaaaagtccactcctgcattgtttgccttcatagccctttcataaggcgacgtatacacgtcggttgtcctcgtatactccacatccactccgttattctggagaatctctccaattgccagagtcagccgcaaagtatcatctttctcctgccgcccgttaaagactgcgcccggatcccgcccgccgtgtcctgcatccagcataattgtatatggcataatctgtctcccttcacaacattctatattaaagtatgcaggcagggctgtcttgttgagcgcgggggataaaaagagccggtatatctttctttaccggcctgtcctctatctttttcacgatcagcgtatcaatacgcgtcttcgctttttatccgatcttttgaatctctatcttcccatacaaagattccatatcttcctttacaaaataccctgtctcctcgcgcattgccgccgcagcggatatggcgcttgccttcctcaaggtatcttcaattccaagcccctcgctaaatccgagggcgaagcctgcaatcatagaatccccgcagccaaccgtattaaccgcgtcgatcttaggcacgacggcccggtaaacaccgtcttcgcatacgcacagcgcgccgtcccctcccagggagatgaccaccacttcgatgcctcttccatggagttctttggcagcctcgatgatctcttcgatctggctgcagtctttgccggtcagcatccgaatctcatcaatgttcggcttgatcatggtcgggcacgcctcaatcccgcgttccagcaatttcccgctggtatcaagaatcaccttttttccggcatcctttgcaatcttgatcagatgctgataggtatcgcttttcagcccctttggcacgcttcctgacatggttaccacgtccgcgtctgccacaaggccggagaagtgttccaggaatccagcaaactcctcttctgtcacctggaacccaggttccagaaactccgtctgcacctggttcttttcatcccagatattgatgcaggagcggctctccgcgtccagacggtagaatgcgctctctacccggaagtctttcagggactccgtgatataatcgccggcatggccgcctacaaatcctgtcgcaacaaccctggccccggcgatcgccgcaggcttagagacattaagccctttccctcccggcgtataggcgcacgctttcatacggtttacctcgcctacctggaattcttctactacataacgcttatcaatggctgcgtttaacgtaactgtaagtatcatggcgacctcctactcttcattcacaagcaatactttgcccttcacaagcccgggcgtcttgaacatctggaaggcttcctgtgcctggctcatgggcatcttcttatagatgaagcccggatcgaatttcaactgtccggttgcaaaatagtgagccgtaagttcccattcctttcccgggaacggagaactgtaagacatccaggaccccgtcagtttaaattccttgcggttcatattctcccacatctctggcgtgaaagcaaggtctacatgaggcgttccgataaagcatacatgtgccttattggctgccagttcaaatgccatatgcatggttggaacctggcctgccgtctcgaatacatacgcatagccctttcccttggtaagcgcaagcgcctgctccatataagattccttcgtagtattgatgacttcatccgctccgagccttaaggccaggtccagccgctcgtcgctgatatcgaatactactaccttcttggcgccaaatatcttggtccactgcatggtgaacattccgatggttcccccgccgagcacggccacatattcgccgcccttgtaatcattctggatcacgccatggagcgcgaccgtagatggctcgaacattgcgccctgctcataggatacagattcatcgaatactaccgcattctgctccgggatcaccacatagtccgcattgctgccctgctgcctggagccgatgaaactgtaatgcttgcagagggagaagtttccattctggcagtcatcacatttcatgcagggaagcagcggcgcgcctgacactctgtctcctacctttaccttggtcacgccttctcccacttctacgacatcgccggaaaattcatgcccaagcacgatcgggtagaagtgtaccccgttatgaagaaccctggggatatcagatccgcagatgccagaggcctttaccttgacctttatcattcccggccctgcctgcggctcctcataatccagatactgcacgtcctcatttgcacatacgactgctgctttcatttctattcttcccctttctgtctcatcagatctttcaaattctcatacagtttcaaatatactttataattcttgtcataggctgcccacacttccggatttggctcatgctgccgctttatgactaccgtccgatctaccgcttcttcaaaatccttgtacatgcctacgcctacgccggccaggatgactgcccccagcgtggtggccgtatcggaagaaggaacgatgatcttcttgcccgtgacatcagacttcatctgggtccacagaagagagttcgcggagccgcccatagagcgcagctcgctgactgtggctccggcttccaatgccacgtccaggttatgctttaaggataaggctacgccttccattgccgcccttacgaaatgtccctttgtcttgctgaagtccagcccataatagacgcccttggcatatggatcccagatgggcgaacgctcgcctgacatgtagggaaggaataccaatccgtcgcttcccggcgccaccttttccgccagttcgttaaaaagatccagggaactctttcccagttcttctcccttcaccctctcgtaatcggcaaattcgtgttccagccagcgcataacgcctcctccgcctacggttcctccctgcagtatccactgcccgggcgccgcatggtagcttaggatcaggcgcttgtctgccttataggtatccatgcagatgctcattccgcctgcctggccgccctgctcctgggtctcccccggatggatgactccggctcctaacgtaccgcatgccgcgtccagagctcccgcgactacgggaatcccctctatcagcccgcattcttcggccgcctgcttagtcaccgttccgactacggcatggcttgcgtagatctccggcaggatatccggattaatccccagttccttgcacatatccatgtcccattcgccggtccgcatacggaagcaatggtgcccatatccctgggataattcctgggtcacctctccggtcagcttgaatgcgatataactgttggactgcaggatcttatccatcttcttatatacatccggaaggttcctctgataccagagaatctttggcgtcgtataggatggcttgaacggattgccgcacacttcgaagatacgatcctccccgatacgcgcgcctacctcttcgcagatgtcagctgccctggtatccatccagataggcgtattcgccagtacatttccttctttgtcgatcggtatggcagaccagctctgcccgtcaatcccgattccggcaatctcgccggggcggatcccgcctttttcaagcgccccttttactgcgccgcacacggcctgccaccattcttccggattctgctcagcccatccgggatggggataatagaccttatagtcgccgctggcgctggcctttacctggccgtcctcatcaaatatcgcaatcttgcatgcactagtcccaatatcaattcctaataaatactgattcatagcaccactcattctttctaatatgctttcccgtcgcatccgcataccttcatgcggcctttgaccagttcttttacagcctcgattcctaccacgccaagtttcttcgggtcaaatgtctccggcttttcctggatcagtttctttcccgcgtccgtataggctactcgcagctctgttgcaaaattcaccttgcacatgcctctctgcacgcattcccttacgtcctcgtcgcttaagccggaagccccgtgaagcaccagcggaacagatactacttcttttaccttggatacgcgctccttatccagcaccggcgttccggcgtagaatccgtgcgccgtcccgatcgcgatcgccagagaggatacgcccgttctttctacgaattctcttgcttcttccggatccgtattggtatcggcctctgcttccaggtcatcttccttgccgcccacttttccaagttccgcttccaccggaattccgacagcctttgccacatcaaccacctttttcgttactgcaatattattttcaaaatcttcatgggatccgtcgatcattacggatgtatatcccaccttcatcgccagaacggcaagttcgaaactgtttccatgatccagatgcaggcataccggtacagatgccttcttagcctctgccgctaccaaggcaaaataagtctccagggtgccatacttaacggttgaaggcgtcgtctgaagcatcaccggcgctttcatctcttccgccgcctggatgaccgcctttaccatctccatattctctacattaaaggcacctactgcatagctgcctttctgggcatcgagtaacatttgttctgaagtaactaatgacattcttttctctccttttctttgatcctttttatgattcttttccaggatagatgcattccaccctgtacttctcaaattcctgcatccacttggctcccggcttcttatccgtaacgatcttggtaatctgagaccagtctgccaccttggtaaatgcagtctctccaaacttggtatggtccgcgaccaggattctttcctttgcagacttaagcatcatccgcttgctgttggcgtcatgctcatctgaatccgtcatccctatttccaagtccaggcctttgcaggatatgatcgccttatccacatggtaagaacggatcatggcatccgtatgaggaccaaccaaggcaaaagacttctccctggatatccctccggtagagatgacgttccattccggcatatcgaatagttctacgataatctccactgaattggtgatcaccgtaagcttcttcatctctttcaacgccttggctatgtatacatccgtggaactggcatccagcatcagcgcttcgccgtcccttaccattcctgcaatcagccgggctatcttttccttttcaacaatcttctgattcttcctgatgttaaatggaagatcaaaaatactgtgctcatttaagactgctcctccgtaacttttgatgaccagcccgtcattctccagtttttccagatctcttcggatcgtctcctcagacacctggtatatcgcgctcaactcgctgactacgactcttttatctgcctggaggcgttccaatatatcattccgcctttctatcgcaagcatttccaacacctctcatttctcatccgcccgctttttagagcatgtctgccggatgtcttcctgtcagcccatactggcgtctcatcccgtaaagcctcttcacctgctcgtccgtcagttccttcggtcctcccagcatcttcgcctgatacaaaagacgcgcatagaactccagggactccatcttatgataggctcccataagggaatctgcgtaacttaaagcgccgtggttttcaagcagtaccgcatcatagtaagggaggtattcagataccgcatccggaatctccatggtagacggagttccatacttcgcaagcggaaccgtcccaagagaaagaacagcttccggcataatcggctccgtaagcggaagtccgcagaccgcaaatgtggtagcgtacatcggatgggcatgcacgaccgcctttacatcctcgcgctccttatatacccgcatatgcatcttaatctcggatgaaggcttaaacccttcgtttgcctcaatcacatttccctctgcatctaccttgcatatgtattccggcgtcatgaatcctttgctcactccggtaggcgtgcacaagaactcattttcgctaagtttcacagagaagttgccgtcgtttgccgcaaccatgccgcgattgtagaccctttttccaatctcgcacatctcaatcttgatgtccatttcactctgcataaccaaatcctccttatttatgactatttttgttttctgtcgtttctaagttgatattagcacacaatccaatataaatcaactattatatgtgtggtttcgtgttgtttttcgttaattttgtaacgtatgcagatttgtataagccattggtccaggcattgccgaaaaggctctgcatcgtgcatagattctggatcatttccataaaaaaaatgctgccgcaggatagcggaagacttgcttattgtcattcccatatcctgcggcagcgttttgccttaatttctaactatatcgactatctctgtatcttcgtcagttccttcatatcatccttcagatgattgtagatgctcttgtagagtctgaagtattcgttatatttcttgtggttttcttcgtttggcatgatcttgtcatccagaacctgccatttctttacctcttcatatgtaaggatgccggttccgattcccgccagcatgacatctcccatgttcgcctctacatcatagattgggcatacaacaggatagcctgtcacatccgcgaatatctggcgccatacctttgacttggtaacgcctccggcgatcaggatatactctccaagctcctctccggtggcttccatcgcatcacgcaggcagtatgccactgcctccaggaatgcgcggtagatgtgtcccttcgtatgggtcagggataatcccacgatcgttccttttgcgtcagaatcccacaccgggcttctctctcccatgaaatatggcagcactacaagtccctcgcttcctgcaggaatctcctccgcctggccgttcagcacgtcatagacgctcggcccgccgttcttctggttctcaatctcccactggcacagcgtgttgcggaaccatttgataatggcgcctgccgtattgcctcccgcaaagtagtaggaaaggttcttggcatcatacaggtatggccatatgatcaatccttttccctttaccggcttgtctgagatcagcgccgcgcacatggatgtaccgatcgcagccgcatagactccggcatcaaacacgccaaggccgatgttggctgctccgcagtcgataccgctggcgatgaccggaaggccttcccataatcccagttcttctgccatctctttcttgattccgccgacaatgtccgtggactccacaatcctctgcggcatcatggaacttgggattcccatggcatccagcagttcttcggaccatgtgcgggtattcatatcgaagattccgccgatatttcccgcagacgagtagtcgatggcgatctctcctgtaagtttatagattacataatcatttggaggaaggaagagtttcgtcttcgcccagttctccggctcgtggttcttcatccacagaatcttcgtatatccatagtatgggtcagctccgttgtgggtgatctcaagaagtttctcctcgccgatgttctgaagcacccagtccgtctcttcctgcgcgcgcctgtccatccagatcatgcatggacggatcggcttcatctcctcatccagcggaatgccggaacctccgtacaggccgctgatggcgattcctttaatgtcttctttggctactccgagctcattcactgccttctccaccgtctttctgatggactcttttgtagcctcataccagacatccggccactgttctgcccagagcggctttggcgtcagcacgtcatactcctccagatcctgtgagatcaatttcccttctgtgttcatcagtatcgtctttgtccctgatgttccaatgtccgttcccagtaaatacttcattctttctcctccttacgcctcgcccatttatataaaataattttataaaatatatttatataataaagtgaaatcccttgattgtcaatcatatttactgtttctgttacatttattttccggttcttacttccattcaagcatgtatctctggaactctaccgcgcgccttgcatcctcatccagccggtcctcgcccgcgcccttgctgatgtctctccagaccttgatatcagagcctacctgtccgcccatgcgtacaaatggctccataactacggttccgtcatactcaatctcgcgcaaggcatccccgatctccctccatggggtgcggccctttccgggtaccatgcggttgcactcgccggtgtggaagtgtccaagaagtttcccggcatggcggatcgcgtcgccaatgctcgattcctcgatgttcatatggaacgtatccagcatgactttcacattatccatgcctacttccgacacgaacttcacgccttcttccgaagtatttaagatatggctctcaaagcggttcaggacttccattcccagattgatgccatactggctggcgatgggcgccagaatctgcattccctccacgctgtgcttccagtcctcttccttattggctgtggcaaagtccaccggccagtatgaataaagcgctccgccaatcagataaatatcaaggcctgccatcacctcgaacaggcgtttataccattgaagcgcctcttccctgatcttcggatctgaggaacccatattatgattgaaggcgggaccatatcccgcggtcagctggataccgttatcatcggcgcattttttcagttcctttacctcctgcgcagaatagtccggcagtggcgccgcgccaacctccagtatatcgaatccaagctttgccgccttctctacataccgcttgtaatctgctgcccattcctgttcccagtacgcgtaataaataccatgcttcatatcatatcctcctatcttccttctttttaatataccttaatatcaaatgaatcgtatatcatctgccttgcttcttccttgcttttaaactcgccgctgtgtatcatctgcgcagccagattgccgatggccgtgccttccgtcggtcctacatggacttccttcttcgtggccctggccgtcagctcgttgaggtattcggcattgcctccgcctcctacgatgtggattctgctgtaggtccttccggtggatttctcaatccccttgatggtccggtcatagcattccgccaggcttgcgtatacgcaggttgcaatctctcccagcgtctccgggaccttctgcccagtccttctgcaataatccttgatctcctctatcatattctccggcgccatgaagcagttatccgtcacatccacgcgggatggaaagtcgctttccctggccgcctgggcacagatctcggcaaagctgtacttgtcatccagattgtgccttaccgactggatcatccacaatcccatgatattacgcagatagcagatcttggaaccatacccgccttcattggtgaaactgttgattcggcttaattccgaacagtccggcgtatcccgctccactcccagcagggaccatgtgccggaactgatgaatacatagtcgtcatcattggccggaaccgcaagaattgcagaccctgtatcatgggtgcatggcagcaccacatccatattgaatccaaactcctcgaccagttcctctctcaggctccccagactctctccgggcatagcgattctctggaacatctctttattgaatcccagacggtcaatcaactccatatcccaggtctggctcgccgcattgaccagctgggacgtggtggcttccgtatactcgttcaccttcttaccggtcagaagaaagtggaaataatccggaacgaacagaagggctttcgccttctccatatcttccggctgctgcttctttaccgccatcagctgaaagatggtattgaacatcatcttctcgattcccgtccgctcatacaattccatttccgggatcctgcggtatacttcctcatccatgccatccgtccggctgtccctgtagcctaccatgtccccgatcacctggtcattctcatccagcaggacatagtccacgccccaggtgtcgattcccatgctcgacgggatcttcccgatctctttacacttctttattccatttttaatgttttcgaacagccctttataatcccagcaaaggcggccgtcctttttggtcattccattttcaaaccgatagatctcttccagtacgatctttccattctctacgcttcctaagatatgacgtccgctggaagctccgatatccactgctaaataatatgctgacatattcttctcctgttatctctgactggttgactggttacgctatgccatagtgcttccggatcatatccttttcaaaattcagaaggaagcgtgcctcctcatccagcacttcttctgaaggatcttccaccagatctctccataccttgatgtctcttgcgacttccccgcccatctggacgaacggctctgacacgatccttccctgataatcgatatcatggagcgctccaaatatttcatcccagtcgaggtgccccttccccggaacgacccggttgttctctccagtgtggaagttcttcagatatccgcctacagatcggatggcgtctcctatggagccttcctcgatgttcatatgataggtatccagcaggattccgatcttatcactgtcaatctgcttcacgtactcgatggcttcctttgccgtattcatcacgatgccctcaaaccggttcacgacctccacgcagtaagtcacgtcataatcttctgccgtcttaatgacctggcggacgctttcgatgctgtgctccacgatctcgcttttgtcatccacgatatagtccgggcttccccagccggcatagttgacaccggaaagcagttttccttccatgtatccaatccgctccacgatccgcttcagatattcgattccgccttccctgacttttgcatccgggcttgcgacatcgtacttaggattcagcccaaggctgtaggtcagttcgattccattgtcctttgccgcctgcctgacctcatccatcctgctcttatccatctccagaagcgcctgggcctggaattccagaatatcaaatccaaggccggatacctttttaatatacttgacatgatctgcatcccagttcttaacccagaaattcataaatattcctattctgttcattttatttcctcctacttttcattgcttgcttctattacaggctgctatccagcctatagtactctttcagacaccggtatccttgctcgaacagcttcttctgtcttttatatacctggctgtttcccccgtccgggcagaagtcgtcttccttcttaacaaactggtgtatgaccgaaaagtctttgaacacgcccactcccacgcctgcgataaccgccgccgcgatggatgtggcggtctccacatgatccagccggtgaagccggacccccagcacatccgacaggatctgggctgatgcgtctcctctggctccgcctccggtcagcaccagttccgtaatctctcttttctccctctgggcgctcaggataacatccagattcattgcaacgccttccagcaccgcccggacataatcacatttttcatgctccatgcgaattccgaggaagcttcccgaagtctccggattccatctcggactcctttcccccagcatatagggaaggaatatcagtcctttggctcctgccggagacttcctcacgagcctgtccatcttctcgtacacagaagtcccttcctgcctcgcaagttcttcttcatcctggcaaagcgccttttttatgtaggaataggaactgcctgccgcctgcatggttccgcagggcatatatttccccgggatgacatggccgaagcagatcagcgtcttctccttatccaggaacacctcgtccgatgtccccgcaatccacgcggaagtgccataagacaaaaacatctggccctcctcaatgcttccggcgcccagggcggaacacgggccgtctccgccgccgcataccaccgccgtctcttccgtaagccccaaggctttcgccgcgtcaggaagcaaggtcccgatcacatctgtggatgcgtgcagttcgggcattttttcggggcttatgcctgccgcgtccagtatttccccggaccatttaagtctctttaagtcaaatgcgtccgtcccggacgcttccgaataatccgtcacaaatctcccggtcaggcggcagatgatgtagtcctttgccagcatcatcttataggtctttccatatatatccggttcattgtccctgatccacatcagtttctcaatgctatagctggcgctgggacggtggccgttcaactcatacatccggtcgaatcccactcgttctaccagctgctccatttgttcctccgccctttgatccgcccagatcatagccggacgcagcgcttccccgttttcattcaccgcaatgcatgcctgcatctgggaggaaaaggaaatacccagcacattttccggagagatgtcctcaataatcttcctggttgccgtgcagaccgcctcccaccagtcttccggattctgctgcgcgcagttcttttgaaagaaatgcacctcatacggcaccgtgtaactctttaccaattctcctgtcgtcgaaaacaaagatgccttattgcttgaagtgcccaaatcatgggctatcagatatttctccacgtcttctcaacctttctttcacgtcttccgtaactacatccgattataccatacagcattcattttgtaaacttaagaaagcataaatctttcgtacgaaactaattcacttgacatagcacaacttatatgatagtatacagatgaatcaattccacgatacttaaaacggttaggaggaatggctatgaaagaacggcacgcagcccttctagactatgtaatgcggaacgggaaaacagaagtcaatacgcttgccgagtttctccagacttcgaaagtaaccgtgcgcaaggatctggattatctgtctgagcgcgggcttctgaagcgggagcgcggctatgccgtgcccaatgaccccagcgacatctattacaggatgtccctgcactatgagaccaagcagcgaatcgcccgcaaagccgctacttacgttcaagacggcgagacgctgatcatcgaatccggatccacctgcaccttgttcgcatacgagttggcgaagatccggcagaatatcaccattatcacgaactccatgtacctggccagctatgtcaaggatcataccaatatccagatcatcctgcttggaggtatgctccagccttacggccagtccctgatagggccgctgaccaaagaagcggtcaaggccttccatgttgacaagatctttaccggaacagatggctattcccgcacttttggatttaccggggacgatctgtcccgctccgataccctgaacgccatgacggattgcgccgaccacacttatgtgcttgccggctcggagaaattcacccgccccggctctgtctccttcgtcgccctgaaggatgtgcacgaagtcattaccgacgacggcatcccggcggaagaaaaggactatctgaccaagcagggaattatcgtaaccatcgcctgatggcgcagtaaaatagattttatttattcacaaggaggttcttatgaaatattttttagatacagccaatcttcaggacatcagatactactgcgatgtcttcccaatagcgggcgtaacatccaacccttccatcgtaaagaaggaaggaaagatagacttttttgcccatatgaaagagatccgttccatcatcggaattgacaggccgcttcacatccaagtgaccgcgccggatacagaaggaatgctgggagacgctgacaccctgcttaccaaaatcgaccccgaggtatacgtcaaagttcctgttacaatggaaggcatcaaggctatcaagcagatgaagtccagaggcatccacgtaacgggtaccgcgatctatggcaagcagcaagggttcctggccatggaggccggagcggactatatcgcgccttattttaaccgcatggagaatatggggctggattccgacgatgtcatcgcatcccttgccgatatgatcgacctgtatcattatgacacccagattcttgccgcaagtttcaagaatgccgggcagattgaccgcgctttcctagcgggggcgcacacggctaccatggatccagccatcctcaaggatgtcctcacccagccttatatcaccaatgctgtagacacattcgattccgattggaagtcagtcttcgcagagaagaccatatccgaattataaaagatgctgcagcaggattccttctatctggtatacctttgcgttccacttctcctcctgcgtgcactggctcttaaggcaggaaaatatctgctctaccgtgccgcttaagttctgcttatacatcagcaagtctctgccggtatttcccgcaatctcatccaccgtcgcgatcatgatatccgcatccatgttctctgccgccttgcaggcaatctcgccgcagtccctgtcgctgcagatcacggctgcgttcttatcctgtccatgccgcttcagcagttcttctaccatctttctacccttctgggtgtccttccagggaatcttaagtaacatctccccatctcccccattctcaagataggcttcttcacgggcattgatactgtaggcattctcaagatcccatcctatatatccgatccgttcatatccccgcctcttcagttccccatataaggcccggattgccagggcattgtcaagggtcacgcagtctgcgtaaggaatcgccttatccgagtcaaagaataccatattcatgccaagggcccgaagccgccttaacttctccacatccaccggaaggtcctccagccagacgaccgcattgcgcagcccccgtttgtatagccgatagagacagttttccagttcttccagacgcggcttctccacatacaaaaggagcgcatcctgtgtctctgcataattctggaagcggccgatgaactcggcaaaaaatgggttcctggcaggcgcgatcaaaacgatcatatccaattcgctcttatttccgcgattgcgcaaggtaaccgtggtccctcgtcccacctgccgcacgatcagtccgtcatcctccaatatttccaaagatttgcgcaccgtcacgcggctgacttccagcatctcttccaattccctctccggaggcagtttatctgcgtcgctgtaatgccctttaaagatctcgtcacatatcctgttttttacaatctcatacaagttttcatttcccatgccatgctccgtctcttatcccgtcttctgcgccttacatgctggtagattccatatccagccgcttaatgatgtcttcctggatatccggcgacaggtccaggaagttgacgaacgtgccgtgaatcctcataatatacactccgctgggcgcgtatttcttcggatcagccagcaccttgcgaagcatctccggcgtcgtcacattgacatacagatagaacggggagattccctccttcttcggattatagaatagcggtccgataatcttattcttaaactccaatcccttctcttcgtaggaagacgtcttaaaataattgggattgattcccagatgggacgcgcagccgccattcatcttctcaaacggaagcttcatgttggacatgatccgaaagcccagtccagagtgcgcctctccatacagcggatcgattccgtatcccagctgctcccttgccattcttccatccggcgtggcccctacccaatagccatacagaagatgggtggatggggatgcccagtctgcccggaatggattgccaaggtagttcttcttggaagacaccatatcgctgactcttgctgcgatttcagctgcttcgtcatccacgttcgcggtattgttgccatatttctcggctttcatcagatactggcgcatctgctggtcatgctcgaaattatcccggagggcctcaagcatccggcctgcgtcttttggccgttcctcaagcagcctgtcgatcgccgcaaaggagtccgccactacggacagcccgtgaatcaggcagccgcttccattgtattttgtcccctggttcctggtatcccttgtgtcaattcccgtctcgatgcctcccataagcgcagacaggaacggaacctgaaggagggagatggcttctgacgcggcattggcgcactccaccatctgatctacatattcttccagattctgatagaaggtggagcggatattcttaagcacatccacttcctccttatatccgttttcctcgttgcttttgccgaacttcctgccggagatcgtagaaactccgccattcaaagacagttccagaaccttcgccatattcagccagctgttggtcgtattgccgttgtccttccccatgatcagaggctcctggcagcctgccacagaatagtcctctagatcctccggctccacatgattcttctccttcaggatctcgaacacggagtcatcattaaagaaggagggggtaaggcatcccggcgtgaagaggaatcttcccagactctcgtacagttcatccggagtatccttatgaagcttcacagacaggatcggctgtggcaggttcatatcataataagcatccagaagcgcataggaggtggggttggtcatatcctctcctgtgttggattttccgccgatgatcagatcctgggagatcgcccagcttctgtcagctacattgtagaacaccagcagatgcttcaaaagcgcggctgtcatatcccgcccggtatcttccgcctgacggtatggttcgaagatgcggtccgcgtttcccacggaaaatgcatatggattaggggtctgttccaggcacattacctgccacatcaaaatgaatgactggatggcctcatacaagtttgaagcgccttgtcttggaaccttccccaaggcgtccgccataacttcgaaccgctcttttactgctccttcagacttggctgccttctcccttgccagttcttcatatctgcccgcaatcaccagcactgcatccagggctatatccatagcgtcatagtaatccttcttatccgcatctgcctctgcagccttatggcgcctgatctgctctttcagcccgtctacgccgatcttaagcaccggccgcatgtccgggatcagatggccggttacctgttcgataaagaatatggcctcgctggtattctcccccgcaatgtcatatgctttgcacagcgcttttgcaaaatccgtgttcatattatattccttcaggtcatcaatccgttcctgggtgatgtcccccatcgggtcaatgtctccgaacacggcaaccggatcgcagtatcccgtaaaggagtctacagaaaacgcagggttgatcagtgcatatgatcttgcaaatgcgtcgtcctgcgttccggcaaatacgtgatagtcgccaatccacagcggaatcttcttcgccacttccaccagcgttttggaaatgcgtatgcagtctttctcatccttgaactgctcgtcgcattcccgcatgatctccttagccaggaaccagccttccagatgatccgttgctctttcttcctggaatctctcttttgccagctgcgtaatctcctgcgcgtttaatacttcttcgattctcatatcactcttcctttcccttaagtccttctgtagcggacgcccgactcttccattgccttccggaatctcctgaccgacgcttcatccacataggcttcgtccgtcatcttatattcccatccgcactgatgccatttctttttgccaaattcgtgataggacaggacttcaaaagtcacgttatctcctttaatcacccggaagaaatcaagaaactgctcccgttccaactcgctgtcattgaaacctccgatcagcggaacccggacatggagtcctggatgctcttttgctgcccggcggatattctccatgatcctctcgtttgatatgccggtatatctttgatgcttggaggcatcacaatgcttgcagtccataatcaaccggcctatatagggaaatagttccggaagcctcgggtgtgtgccattcgtctcaatcgcggtatggatgtccttttccttcaatcccttcaaggcgtctgtcagttcttgaaattgcacggtggcctcgcctcccgtaaaggtgacgccgcccccgtcatagaacatcatctcatttgcgcatgcttccccaatgacctcttctaccgtctcctctttatacgacaggtacattcctttggtatcgtgctgccggatgcattcttttccttcgcagctatcgcaaatggccctgtctaccttgtgctcgcggattgcgtgatgggggcagatggatggaagaagccactcttcgtccgccacgatcacgccctccatcttcatgccctctggattcgagcaccacgggcaattcatgttacagccttggagatggtagaccaggcgattcccatctccgtcctgagaataattaaaacctttctggaatatcttcatcttctaccctttcaaatggaacaaatcctgattgtggcggtacagttcccgatataccgcgaattgctcttcgtaatacttctggttctcgcggatgggggatactgcctcgtccttcatatgtaccagtttcgcgcaggcctcttcatagtctttatattctccgcacgctaccgcagccgtgatggcagcgccgatccccgcctgctcgcttccctggttggtatatatgtcacagtcgaagatatccgcctgcatctgcagaaagagcggccctcttgcgccgcctccggaggcaataatcttgtgatactcaatgccaagtcctttaaatatctcgatggaagagcgaaggccaaacacaataccctccatcgtgctgcgtatcatatgggcccttgtatgcttcaaggtcattccgaaataaatcccctttgcgtccgggtcattgtatggcgtcctctctccgctcagatacggaaggaacaccataccctcactcccagccggaaccgtggccgccagcgccgtcatctcatcgaaggcgcccatatccaggatctgattcatcagccacttcatggcaaccccgccgctaagatgggcacccatcagcatccacagatccttcttcacatggcagaacgtattggtgcggaactctttgtcgtataccggctcatggaatccccctgatagctggcaggccgttccgatattggccgccagggttcccggcgcaatgatgccattgcctacgccctgcatcagcgtatctcctcccccgtacgcaatcttgattccggcccttagcccggtgtcggccgcgcagtcttctgtcacttcccccgcaatctcggaagactcccggcattcagagaatatctctttcctgattccaagcttctcgattaattcccaggcccattgccgattacgggtatcaaatatggctccgctggatgcatccgacatatccgtcccaagttccccgcacatccggtagcggatataatccttcggaaacatgaccgtatggattttttcataattctcaggctcatgctccttcacccacatcagcgaggagatcaaaaatcccgtgctcagagaattcaaggccacgctccggtacgcatccttccccacagtctgatagatcttctcaatctcttccgccgacctctgatccgcccatatgatggcattgcggatcagtcttccatccttatccaccatgaccagcccatgcatctgccctgagtaactgattccctgaatcttcgcagattcttccggatacctctttacgatatccgcgatcgtcctccttgcagccgcccaaagttcctccatgttctgttccgcatgcttaaggctgctttttataatatcatatccgatctgcgaggtaccggcaatgtttcccctggcatccataagcagcgattttacactggaagtcccaatatctattcctaaataataattcataaaccgtactcctccttttaattggtattatatatcaataccaatttgccgtcaatataatttgcgataatctaagaaaaacgaaggccgggaagcccctgccttcgtttcatcctttatgctctcttatgaaacctgaatcataacctttccggttcttctgtattccggctttgtaaatacatccacaatgtcatccagtggaacaatgttggtgatcaggctttccaaatcaatggtcttggattccagaactgagattgccctctcaaatgtatatggattgatataggaagacgttaccgtcaattcctttttgaagatgtcatccggcttcatcgggaaactctctcccggcgcggcaagtccgaagaacattaccgttgccgcttttcccgcgaactggatggcgtcttcctgggtgtggatatttccaacgcactcgatgactacatccacgttctcgcagtactcatccaggactgccttcacatcctcttccatcggattaatgacctttgtcgcgcccagttttaatgccagctcacgcttctcttccaccggctcggacaggatcacctttgatgctccggcgttcttagccagctgcagcatgatcattccgatagggcctcctcccattaccagcacggtatccccatacttgatgttgcacaggtcaatcccatgcaggcagcaggagataggctccgccatcgctgcctctataaaactcaggctatcggagaacttgtatacctgtttctctctcataaccacatactctgcaaatcctccgtctaccgtagttccaactccgatattattggtgcagaaatgctgcttcgcattcttgcagaaatagcactctgcgcacatatcattcgggtcgccgcttacccggtcgccaactttgaatttggtaacgccgcttccaaccttcgccacaacgccggaaaattcatggcccggaatcagcggaggagtaacagccgaggatcccccatccccgttaaaaatatgtatatccgttccacatacgccacaatacttcacttgaatcatgacctcattgtcttttaattctttttccggaacttcttctactcttaggtcgtgctttccatgataaactgctgctttcatattctaaccctccataaccgttctctctaaatcgtattaaaaaactcatcaatataaaagattgccgctcccgcagccgcagactccactgtatacttgcagggaaccagataatctttagccttctcatcaaaagcatccctttcatccactctcctgcacagttcatccatatagttctctatatatgcgccaacatacccgccaagtataattacagaatcaaacagcacgcgtatgttgtgtatgccaagagacagatcatccagatactgatcccacaactgggcagcacctttatcccctgcttccagcagttcaaaaaactgttccagattcccgtccgtatactgatccagattcgttgaccggcagaccgtatcaaagcatccccgccttccacagtagcataattcgccgccctcaggaaccaccgtcatatgtccgatctctccgcctttttgccggttgccttcgtaaatattcttatccacgatagctgctccgccgacgctgttgctgagactgatgtagaatgcattgcatatatccttggatatccacacttctgcatacccggcagcattggaatcgtgaaataagcggttcctgtaaggaatatactttgcaatctccttccgggtacggcctgtaaaattcaaggtacggccatagattgcctcctccccgtcctcagaaacgaggccaggaaccgcaattcccactcccagaaggttctcatcgctgatgcccgcttcctgttttaccttctcgacagtctctccaatcttcctcagataaccgtcatctcccaaatcaaattctctccgctctcttaccatccgtatcacatcgccggacagatctaccgcgacactgttaatatgatgccctgtcagatacactccgatagccgctctggcctctttcagataggtgtatgccgtggcgttccttccccgctccccagtgcttggaaacttcttggatgtatcgattagccgtatctgctccagatactggagattctgcgtgattgttggcaggctgagcctcaatcctatgacgatgtcttgcttggataccgactcctgttcccttatatagtgatatattaactgacttttcttcaatgttctctaccttcgctgttctataatatatctatcattttactttctattatactgcctgtcaacaaactaaccatcttaaagaacaatctcaaacctctcgtcatctttcaagtcaaacactgtgcaatcatttgcataggtacattccggcaggataattagcgcatgcagttcatcggcatgtaccggaagcggcgcaagatgccagattgccttggcttctgctttaatcgtcttcatgctggcctccaatcttctggtgaaatcccctgatttttaaaaatcccagcaaataaaaatttaccgggatttttaaactatttaactgttactaagtcgtctgtcttctcttctggatacagtcaaatccaactgcaagcgcaagtacgacacccatgacaatatcctgtataaaggagttaatattcataagtaccattccgttctgaagagcaccgataataaatgtacctgccacaacgcctgatatctttccataaccacctgctacggatacgccgccaagaactacgcaagtgataacatcaaattcatatcccagacctgcgttaggcattcctgaatttgtacgtgacagcataacgatacctgcaagtcctgcaaagaaacctgatatagaaaataccagatatttaattcttcctacacggataccggataatctagccgcctctacgttaccgccaactgcataaaagtagcgtccaaaatatgtcttattcagaataaaggaacctaatgcaaagcagataaccataataattacaggaactggaacgatgccgatatatccctgcccaaatatcttaaatgactctgtaaatccatttaccggaagtcctccgctcacgagatacgccaaaccttggaacgctgtctgggtagcaaaggtagcaatcagggctggaatgccaactgtagataccataaatccattcaatgtaccaatcagagttgatactacaagagtaatcagtatggcaagccacatattcattcccatatgtaccataaaataagcacaaataatatttacaaatgtaataatcgagccaattgacagatcaatatctccaagcaggataacaaatgtcataccgatggaagcaataccgaacatagaaacctgacggagcaatgaaaataagttattaggattaacaaatcttggatttgcaattgtaaatgctacaacgagaactgcaagtacgacccaaatcgctttatcttttaattggtatacaactttatctttcatacggtttaaccctcctccattcttgctgcggacgcatatgccataatagtctcctgattgaactcgcttttattaagttcgccagtcatcacgccttccgacagcacaacaattctgtctgacatacccatcagttcttccatctcggaagaaatcatcagaattgcctttccttctttttctaccaagtcgttcatcaacttatatatctcgtacttcgcaccgacatcgatacctctcgtaggctcatcgaagatgatcagttctgaatccgccgccagccatcttgcaagaataactttctgctgattgcctccgcttaagttctttacaagctggttcagagtaggtgtcttgattgccatactcttctgatatttctgggctgtctccatctccagttttgaattaataacgctgaggcgtgcagtcctttcatatataggcatattaatattatttttaattgatatcccaagcatcgcgccgtgacgcttcctgtcttccggaacaagcgcgattccaagatcaattgcttctcttggactctttggattaatttccttacccttaaatactatctgacctgacgttttctgagcggccccaaatattacttgcgccagttctgtccgcccggctcctaccaggcctccaaggcctacgatctcgcctttgtggatcttcaggcttatattattgtctccgtttccagtaacattttttaactccagcaccacttcgttgttatcaacgcagttttcacgtggaggatacgtctctgtaagttcacgcccaaccattagtttgatcagttcctgaacctcgctgtcttttgtaatgagagtcttgacatactcgccatcacgcaaaaccagaattctatctgataagcgatagatctcttccaatctatgagatatgtagacaatagaaattccttctttacgcagtttttctaccacccggaacatactctcaacttccgcactcgtaagaggtgcagaaggctcatccataatcaatatcttagcatcctgctggatcgctttggcaatctcaaccatctgctgataacctactgtcagatttttcatcaacgcttttgggtcgattttaatctgaagttgttcaaatgccttcgcagcttccctctccatcgccttcttgtcaactacgacaccttttctgatgggcctgcccaggaagaggttttccgccgctgacagttccttaacgttattaaattcctgataaataatcgcaattccattttctgccgcaagctgtggtgtcatgctcgtaaattctttcccattcacgataatcttaccggaagtcgggataactgcccccgagcaacacttgatcaatgtagattttccagcaccattttctccaataagtgccagtatctcacccttcttcagttccaacgtaacatctttcagtgccacgacacccgggtattcttttcttatatgctctaactgcaatacatattcttcgctcatattcattccccctgagtcaagcggatattacttagaggcggagcaatccgcctctatctcatcgtctcgctatttttgttttgatgttacattcccttcatgatgtcgtcaatgttgtccaggttgatttccatcgtaggtctctgaacattatgattgtcgcctgagaaatcttctccatctaagattctctcatacattttcatacaagctgtagctgtgtctaaactggatccttcaaatccgataatagctcttacagcctcatctccagccttaagggattctaactgctgaggagtaacgtctgtcgtgataacgcctacattttccggaatcttgccagctccgccgaatttctgaagtaatgcttcatttgatccgatcatagcgcctgcgccaactcctacaaatacagagcagtcaggatgagcctgaagaacggtctcaacgttagactgtgcctcgtttgcttccagtccgtcaacctctgctacgatctcgtagtttcctttgtcgcagttcttttccagaccttctttgataccatttgctctctctaacagaacctttgtagacggcttgccgattacgcaaacttctgccggcttgtctgctgtgtaatgctcgttgatgaatgcagcagctgtttttccgatttcattaccaagtgcagtgttgtcaagaatccagtttgcagtggtattctccattggatcatcccagcacattaccttgattcctgcatcaagagcttcctggcacactgtctcaagtgcgtctgcatcagatggatgaaccatgatcaggtcgcatcctgatgtgatgaagttctctacctggctaatctgtgttgcggagttgttcgtacaatcctgtaaggtatagtcccatcccttttccttcagaagatcctcaagtttgcccattacacctgcccagtaatcgtttttcagagactggatagagataccaactttgtaactgtctttcttctcagtatccttcttgtcgtctccgcctgaggttggcgccttggttgtacaaccaacagccatcgttgcaatcattgccacgcaaaggattgcacttaagatttttttcttcataatacttctcctccttaaaaagaatttattttatagctttcgcattagctatctataataatgcggttcctagaagcaggtaaatgctccgtccacgataatatcggaacctgttgtaaatgtgctcgtgtcgccagccagatatactaagatagactgtaattcttccggttttccaagccttcccattggagccattgcattccactgctcgatcaatggtttcagatgttctgcattcatgataagttctgtaccaatatatcctggactgatgcagtttacacgcacgcccctcttagcccactcgactgccaaagactttgtcagaaggcttacgccggcttttgatgcattgtatgcgcactgtggctgaggtacattgacaatgtggcctgacatggatgccgtattgatgatagagccatatccctgcttcagcatcactctgcctgctgccgtagcgcagaggaatacgcctgtaaggttgatgtcgattaccttctgccactgctcgaatgtcatctcttctgccggagcgtttacagcaataccagcattgttgtagcaggcatccaactttccatatgtatcaacaacttttgcaaccatggcctcaacttggtctttcttcgtaacgtcgcactggatcgcgattgtcttggaacctgttgcttctgcaatctcctttgcaaccttctcggcgccttcaaggttgatgtctacgatagcgacatcagcgcctgcctctgcgaatgcagcagccgctgccttgccgattccgcttgcagcacctgttacataaattgcttttccgtccagtctcatactttcaataattcccattttgtcctcctcccggttgcgagccgttttcattgaataattttgaatagcaattttgtaaaatatttttacaaatattattgttgtaattatattccagaagaatgctttgtgcaatatgcaatattacacaattattttttggtgattttgtatgttttgcataacgttatttatttgtcaattctgcttttattcggcaatttttacaacagccttgacgatctcagccttttcattgacacttctgtccatagccgtctggatgtcatcaaaatgaaagatatgggtagcgattcccttcagatttacttttccctgtgcaactgcctcaattgccattggatagatgtgacggtagcggaatactgtcttaaatgtaatctctttatccagcgccaggctcatcatcatattcatcatgccggtctttccatatcccacaagaacgatattggatcccttgcgcactacctggatcgcctggttcgtcgtaatctctgttccagccgtctcgattgcaaggtcaaatccctcgccgccggtcagttccttcgccttcgctagcacgtccacttcttttccgttgatcacgccgtcagcgccaagttccagcgccttatccagccgcttctgcattacgtctactacatatacatgggaaacgccgcatgctttaagagccatcatggatactagtccgatgcatcctgcgccaaatacgactgccgtctgtcctgccttcgcctctccctgcttcgctgcgtggaatcctaccgcaaggggctcgatcagcgcgccttccagcgtgcttacattatccggaagtttgaagcacagatccgcctcatgggctacatattcctggaacacgccgtctacaggcggtgtagcaaagaagactacgtccggacaaagattatattttccttcacggcagaatttgcatttgccgcaagtctttcccggctccagcgctacacggtcgccgaccttcagatgcgtaacattcctgcctgcttctacgacagtgcctcccggctcatgtcccagcacgaacggcggctctaccacataatcgccgattctgcccatttcataataatgcatgtcgcttccgcagattcccacatattccagcttcaccagaacttcatcgtccttcggtacaggaatcggcctctcggtatagcccatctttccaattccttccatcactgctaccttcattgttccttccataacacatcttcctcccatctttattttatactttaataatttatttaacaaagtgtgtacaataattctctcttactgaccaaatttaaaagccttaaatggtgtcaataaatttttcaatttggaaaatagccgccccgagtgccgatgcctcttgctggtattggcatacgtatacataatctccgctgttctcaaatatgtccttttctgccaccagattcctgaactcttgtatgtaaggctccatgctgctgcccacgtaaccgccaagaactatctcgcagtcaaagcacatccgcagattgtccacagctatcgcaagatccttcagatattcattccatatcttcttaagatcttggtttcctgcttccatctctctgaaaaatctctccagatccccatctgtctgatctgccagcctaagagcggagcaatatgcatccaggcatccgatctttccgcagtagcagcgctttccttccggatggatgaccatatggccaaactcgccgcttctccagttgttgcctttatacatatagaccgatccccggtccttctcctgcgccgcgcgcacgattcccgtctcatttccaaatatgatcgcgccgcccaccgtgttgcttaggaacaggtataccagattgctgcaggtcctgcttctgttgctctccgtaatggctgccgcattggcatcatttagaagttcgcaagggtatggcatgcatgccgtcagttcttcacagggaacatcatagattccaagcgcatgggagttcgtgatataatcccgctgcacatcgataatcgcaggcacggaaatccccattcccagaatccgtttcttgggaatacggctttcctcgacaaaccttcttacgattgccgcaacttcatgaagataagtctgcgtgtatttaaaaggcttgcgcaccctctcatgcttgagcgcttttcctgaaaggtccgtgtaaacgatccctacatgattcttcgtaatatcaagcccgattgcatacttgacatccctcacggccgcaatagccttggccttgcgtccgccggtggattcaaattcgcctacttcccgtatcagcttctcttccttcagttcattcacaatcttaagaacagtaggcccgctgatggaaagcgccgccgatatctccggcatgctggtttcttccctgctattcacataacgaaacactcgatttctattcaactttttaacttcctgattgcttgtgcttcgcttcatccaccttgtcctactttattaagtcatttactaaagatatggttattatagcactggtgatttcatttttcaatgttcattatgcattttctctaatttttttctaaaaccatgggagggttttgtctattttttgtcgaataagatgtccgccacctggaaaaacccgtatgaattctctacagtcataccctgtcgggcctccctaatggtgcatcttccactcattcggatacccggcctgcacgtacaggctcttcccccagcactaccatcaggctgttctcggtcttcttatccgcaggaacagaatgctggtaattcagaattctttcgtcgcttccaatcggccaagaacaaccccttcataaggggttgtctacagtctgaaggggcacggcgtatgatcgccgtgccccttcttattacctactcttatgctttgtctctgcggcttacttcctgccgcctttttcgaattcaagttccagcagttccccaaaagattggatcgcaacatgctcttcttccacctgtccgaagccatatgccgcgaatatcataggaattcccgcctctttgcacgcattggcatctccctgggtatcgcctacatagacggcttccttaatcccattgcgctccatgatgatgcggatattctcgccttttaactttccggtgtctcccgggcaggtataatctgcaaaatactgtccaagtccggtattcttaagaaaggcttcaatatagccggactggcagttgctgacgataaagagcttatactttttactcagttcgcgaaccgtctctgccatctggtcatagacgatgcagggcgccgtctccacccatttattctcatatttataaagatggtctgccaggctctcctgctctatttgtgcaagttccgggaacaggtcgtctatgatctcctccaaaggcttgccaaactcacgctttagctgctcagccgtcagcgtcctgtccatatccgtctgttccttgattgcctggttccaggaatatgccacttcttccgtggggtcccagagggttccgtctacgtcaaatataattccttctatcattgggtctgctttctcctctatctattgttttcccatattataatctctaacaaaagattccgcaatatctgaaggacttttagaaaactacgattccctttttcagtacctgcttattcattgccttatcataagcctcgattacatcatcaaaagagaagtaatcggatatgtagtccttcaggttgatcttcccttcccgaatccactggatcacttcgctgtgcgcagctgcctcctcatctttgcgcggaaactgctgaaaattaagcacccagttatagtcggccttgctgaagtcaatgtgcatctcttcttttcttgggactccgtaacagcagatctctcctcggtcacagatcaggcccatggcgtcatttaccacatcttcagagcccaccgcgtcgatcacgaaaggcactccttgcggaaacatgtcccggatctccttggtaatatcgcattccttgctgttcagcgctatgtccgcgcctccatccagcgcgttcttcctcttaggctcatttctcgcaatcgcaatcactggattggctcctaccatcttgcacatcttaataaaggtaagccccaccgggccgcagccaaatattaccaccggcttatccttttcaatgccaaagtactttacattgctcaacacttctcccaaggtgatcagcatgacggcatccaccggatcgatatcgtcaggaataatacactgcgcctttgccagatcaggcacctctccttcctggtacgccgcagcatcatttaccacgcagtactcgctcaacgctccccaagcagagccataaggtcccagatggtccggatccggatctacgaaaggaagcagcaccttgtccccaaccttaagcccggttacttcctcgcctacttctaccacttctcctacattttcatgccccagcatgagcggatacatctcttccgtaactcccttgaaggcttttttcatcagatgaatatccgttccgcagatgccatttgcaatcgtcttggtcaaagcctgcttcgggccgtatttgggcttcggaacctcctggacggacaaagagccatccttatttacaagtactgttttcatattgctcctccttattgtctttctttcatttcattaattcctatagtatctggcagaattccacctgctgaccggtcggcgcgccaatcttgaagaagcgtactccccactcccacagtcccggcagttcttcaatcccttccgtggtaatcgtatagccctgctccaggccatattcataatccttctccacgtcctccgactcaaagcagtagtggtcgatctttccattgggcgccttaaactctccgattttctcaaatcccagtacatccacataccatgcgaccgtagcatccacatccctggacgccatgcctagatggccaagtcttctgtctttaatcataaaacaacctcctcgtaccacatttgtccgtttccatttctcttttcttatatacctatgttactacataatgaattgtttttattttaccattattaaggctctttgtccagtggattcccggagttcccctttcactttttcacaatctttcttaaatatttgatttacgcttttcaaacgctctaatatatattacaatataactatgtaataacataactatattaaatttaggaggtttttattatgatagcatctagaaccatgtctttcggctcacccggaagatatatccagggacctggagaaatccgccgtcttgcacagcatacagcaaaatatggagacaaggtgttctcagtcattgacccattcttctatgacagcctgacgcctcagctgacggcgcaatatgaggaacagaatgctcagtttaccagcattccttttgagcatgaggtaaccgaagaacgaatcgccgccattgccaaaaaagcagcggaggcgggcgctcagatgattatgggcattggaggcggaaagactctggacactgcaaaaggggcggctaacacgcttaatcttccggttgtcatcgtccccaccagcgcttctactgatgcaccgaccagcgctctttccgtcatctacaaagagaatcatgagcattcccattcgatcaactatatcaagagccctgatatcgttatcatcgacagcgaaattattgccaacgcgccggttcggttccttgtatccggaatgggcgatgcgatggcaaccttattcgaagcaaaggcaaacgccgcttccaacagccccaactacatctgccaggaggccggctccttccgcaggacaaaggttgccatgaaaatcgcggaattatgctatgataccattctggaatacggcgtcgccgcaaagattgccaacgagcagcacgtcgttaccgaagccttggaagcagtcatcgaggccaacactttaatgagcggcctgggattcgaaaatacggcctgcgcctgcgcccacgctgtaggggacggcatcaccgcaacgccaaacggaaccaagaccctccacggagaaaaagtcgccttcggcaccttgtgcgagctggttgccgaaaacgccccttccgagatcgttgaagagtacataaccttctgtatggaagtcggactccccaccactctggaggatctgcaggtagaactgaccgaagaaaaccttcagttgatcgcagacaacgcctccctgaccgaactcgtccgcgaaccctacgagatcacaggcgaaatgctgaaaaacatcgtaaaagccgccgacgccctaggccgctactaccaagcaaactagctccgctgtcgggcgcttccaagccccgatttcccctcacagtgaacttgcattagaacacacagatgggggagagtcggaatcctctccggatccgcctctcccccatcgtcctctttttcaatccgcaattcactccgcaattcactccccaagaatcattacaccgtgccctcgctcctatcggtcgcaatctgcagcagaacggccgcaatgataatacatcctttcacgatttcctgtggataggctggtacgcctttcaagttcatgatgttgctgatcagcgcaataatcagtgcgccgatcaccgcttttacaacatttccttttccacctgcaagactagcgccgccgatgacgcaggctgcgatcgcatcaagctcgccgccttttccaagcgttgatgacgcggtctgcgtcctggatgcgataaacattccggcaatcgaagcaaggaatcctgagactacataacaggagcatacatacttctttacattgataccggcaagctgtacggcagtgctgttggagccgcaggcaatcacgatacgtccataagaggtatatttctgtacaagcgcgataatgatgatgatgatcacgcatccaatcacgatggggtagccaaagtccttgctggccatcgctttaacggctgccacattagagcagcgtaccggggcgccttctgatacgattaaggctgctccatttccaatagacagcgtagccagagtcgttacaaatccctgcatcttgccataggccacgagaataccattcagaagccccatagcgataccaactagaattgctatcaggaaggctaccgcaaggctcacttcatggtctctcatcagaacataggcgcaggaagaagataacgccgttactgcgcctacggaaaggtcaatgccccccgtcaggataacgaacagcatgccaagcgccacgaggatcgggccggactgctgaaggcagatattcattaagttgaccggctgcaggaatgtgcttgacatcaccgcgcacgcgataaacagtatcagaaatataacatatgtattattcgtaatcaaaaaatcttttatatttattttctttttttccatagttagacccccatcgcaaatttaatcaatgtttcttcagacagttcatccttgctgatctcgcctgagatcttcccattacgcatgaccattacgcggtcgcacatgccaatgacctctggcatttcagacgatatcatgatcaccgcaacgcctttttccgcaagcgtattgattaccttgtatatctccgtcttagcgcctacatcgactcccctcgttggttcgtcaaagacaatacatttacagtccgccgcaatccatttcgccagcgccaccttctgctggttgccgccggacaggctgttggcattgtcttccgtatcgccgtatttcgtctgtatgcttgccaggacatccttgacaaactccttttcagacttatgattgattatgccgcctttcgtaattctatctaaacaggcaagcgtcgtattcatacggatactctgttccagcaataatccctgtttctttctgtcttccggaagaaggccgaacttttccttgatggcggcacgggggctcttccagtttacttcctttccaaaataatagaccttgccggactctttcttatctgctccgaagacagcccgcatcgtctccgtccttccggctcctacaagcccgttgaatcccagcacttccccggcctttacttcaaaactaacgccctgcaccatctttcctgcgtgcagatcttccaccttcaggacggtgtctccgatcttcgcattcctcttcgggaacatatcggtcatctcccgtcctaccatcaggttaaccagcctctgcttatcgaatcccgatgtttccaccgtatctacataagtaccgtcctttagaaccgtgatatgctggcttaactgaaagatctcttccagacggtgcgaaatatagatcacgcttacaccctgatcttttagcttatggataacttcaaatagtttttctatttcagaaaatgtcagaaccgccgtgggctcgtcgaatacaagtattttcgcgtctctggtcagacacttgcagatttcgactacttgctggtacgcaacgctcaggctgccacattttgcattcgggttaatatcggaaaatcctagtttttctaactgctcccttgcatccgcccttaacttcttccagttaatcgttgcctttcctgctgagagcttatcaataaagatattctccgccaccgtcagatcaggcgcgagcatgaattcctgatagataatcgctacgcccaaatccttggactctttaggatttgtaatcttgacttccttgccatctataaaaatctgtccgctatccctctgatatgcgccagacaaaatcttcatcagcgtagatttgccggcgccgttctctcctataagagcatgaatctcgccaggctcaacttttaaagaaacgtctgtaagagccttaactccgccaaagcgttttgtgatatttttcatttcaagtctatactgcccttccatacactcacctccacacatgattcaatgattcaaaaaaagtcctcctcgttataaggaggacttaatgattatttagaagccgtattcataacgctcgtcaacattgtcttttgtaacgcagacagcctctgtcatcgttacttcttcataactatctgcatctttgccgtcaaccaggatttcttttgcaatgttcgttgcagtgatcgctacctgccatggagagttctcgcctgtacagtaatattcgccggatttgcactctgttgttccatttatgtagtcatatgcttcctgcgcgccatccgctgccgctacatagtggatgcctgtaagtcccgcgtcatctgctgcctgcatgccgccgaataacatctggtcattctctgcaaacatggtgttaagcttgtccttcgtctttacaacaaggtcattggcatcgttcagaatgtcatttaccgtccagttgccccagccctgtccggcgatggcgaattttgcttcttcgttcgtgtaagagcccttattcagtaactggtcatcagcctctttcgtcagtttccaagcttcgtcttcggagattccaagcctctgctccagaacgccgcagatgagtccctggcgtctctctgttcctgcaacatttcctttttcgccagaaagcatgatggagtagatctcctcatctcccatagattctgcaaatgatttgccgcagagacgtccattctgcttattatcagaatatacggtcgtcacgcagtaacttccgtcattcactccagagtcgatgttgataaccggtattcccgcatcgtgagccgcctgctcatctgcaattacgttgtccggatcaatacagtcgcagaataccatgtcgtactcctgggaaataaatgtctcgaagttttctgactgttttgcaacatccatatccgcattcagcacgactacatcagaagccttatcaacgagtccgatttctgcgcatttctcctgaaccgcttttgtcaatgttacgaagtaaggaccatcctgggtcttcatggcaatgccaatcttatacttgccacctttgtcgtcactcttcttcgcatctttggaatcgtcggagcctttatctgctcctttgcatccaactgccattgacgcaaccattgctacacaaagcagcacgcccaataactttttcttcatacttttttcctcctttttgttttacgtatatgtttctaacgttgttatatcatgatgttataacattgcttcatatttgtcaacaactttttcatcataagacgatcgttttttatgaaaaataacgttaataaaaagacaatcttttttattttttagatgtttttgctatatctatttcttttttatcgtttttacttgtgtattatgtccatttccattatgttgtatggatattctacacttcacgcaaaaccgtgacgggcacccatacatttctgtacagatgcccgttccttctttcttcttttatacgcatgtaaaacatccatctacgataatgtccgtgcctgaagtaaatgaggccgaatcagacagcagatagatgactgctccgcacagttcatccggcgtgccataccttccatatggcgtaaggtccatccaacgctcctgccaatccggattcacatggcatgtcagttctgtgtacatatatccaggactgatgcagtttacgcggattccgtccttacaatattctaccgcaagagacttggtcatctgaatgaccgctgcttttgacgcattataagatgcctgctcctgaggccagtttacaatgtgtccggacatggatgccgtattgcagatggcgcccttctttcccttccccttcagatacctggcaaattcagatgccatataatattctccgttcaggttcacattaattaccttggcccactctaccggcgttacgtcataggcagacttatgtaatacgatgcccgcattgttgaacagaagatccagtccgcccatatcagcatccgcctgctcgatcgcggcctttacttgaaccggatccgtgacatccacgccataggctgccgtcttctttcctgtagcctctgtaatttcttttgcggtctttctggctttttcctcctgcatatcaaagatggcgatgttggctccgacttccgccatgcgcatagcaaccacgcttccgattccctgcgcgcctcctgtaacgattgctgtctttccttctaatgaaaataatttttccagtgcgttcatgttctctctcctttactgtttctagttgttcacaatttcattatgtagttatgttataacattatctgctatttgtcaacattctcattttacaagttggatattgacattcatctataatcgcaatataatgtcactatgtaatgacattgttatgcaagcacattgcggagcgagatttacaactactaaattaagaaaggatgattaatccaatggcaaatgtatatcaaccagcaactgccccaactctatattttatcggcgttaccactggacagtcttccattatgaaagtgttccccaaatgggccgatgcacttggattaaaggatgctgtcatcaagggaattgatttcgcccctcattcttctgcagaggaataccgggaagccgtcacttttatcaagaacgatccgctctctcttggggcgctcgttaccactcataaaatcgacttgttcaacacctgcaaggacttatttgaatatgtggatccttatgccgagagattgggagaagtctcttccatttctaaaaaggatggaaaactctgtgctcatgccaaagatcctatttccagcggactggcgctcgaaaacttcgttccggccagctattggaccaaatacgacggggatgtgctgctgcttggagcaggcggaagcacccttgctatgtccgtatattttgcgcaggagcaattcggcaataacgttcctaagcgaatcattatcgctaacagaagcgttccgagactggagtcggcaaaagccattctcgatggaatcaatccaaagattcattttgaatacatacacaatcctacgcctgcggataacgacaagacgctggcttccctgaagccccactcccttatcgtcaatgccacagggttaggcaaggacggccccggctcgcccctgacggatgactgcgttttccctgaggacagtctggtatgggaaatcaattaccgcggagacctgcttttcaagcgacaggcagaggcgcaggcacaatccaggcggcttcacgtggaagatggctggatctacttcattcatggatggacccaggttatctccgaagtatttcaaatcgaaatcaagggcgagctgcttgagaaattaagcgagatcgccaaatcataaggaggcataaaacaatgaatcaatttaattgggataccagtttccaggtagatttcgaccttctgacaggactttcaaagactgccgaaactaccaaacgatatctttcgcagatgaaggatatgtactatgacacggatgccgtaaatgaggtattaaaaagcgacgatcccctggtctatgagtttcatgaactgggaggtccggagcgggccggtgatctggcatttggaaccacgatcctctaccctggcatcataggaaatgaatacttcatgaccaagggacatttccacaccatccttgataccgcggaggtatattataccctggatggagagggctatatggtcatggagaatccagagggagataccatggaacttcctttgaaaaagggcgaggccctctacgtgcccaggcgttacgcgcaccggtcagtcaacactggaactgtgccgcttgtaatgttctatacctttgcggcggatgccggacacgattatggcaccatcgagaccaaaggctaccgcaagttaattgtccgggacgcaggcaagccatcagtcatagacaatcctcattggaaatagggaagatattatgaaagaaatcatcaccgttaccgggcggatagccccggaagaactaggcttctgccaatgccatgagcatatcgccatgagcaaaggcatatcctatcagatcaatccagcgctatgcatagacgatatggaaaagagcctggaagaagcaaagcgttttcatctggcgggcggccagtctttcatagaagcccagccatgcggcgcaaaccgcatggctttagaacttagaagcctttcggaagactccggcgtgcatatcattgcctccaccggctttcataaactatgcttctatccaaaagagcactggatccgcaccctgcccccctctgatctggaggaattattcgtgcgggaactgacggaaggaatgtttgtcgatgccgaccagggaatgccgcagactcagtgcgatgccatggctggcatcatcaagatcgcttatgacacggaagaattaagcccacgctacaaggaactgtttctggcagccgccagggctgccttgcgtacccgtcgcatcctcatgatccatgtagagcagggaacgaatccggcgctgcttcaggattacttgctgaacctcggcatccgtccacaggatctgatgttctgccatatggaccgcgcctgcccggatctggagcttcacagacgcatcctctccaaaggctcctacctggaatttgacaccatcggacgcttcaagtatcacagcgatgagcatgaaattcagttattcaagactctggtcagcgccggatacgaaagacagctgctgtattcgctagataccacccgtacgaggctcagatcctatgtaccggatgccataggacttgattacattcttaccgtattcaaccagttattaagagattccggcatttccggggaaaccatccatctgatttccgtcgaaaacccgaaacgtatattaacccagtaatttgcacctgcatattacatccattacaaggagcgaatcattatgagtaaaacacatctattcgaacaagtcgccgcaaagaaaatcattcccgttgtcaaactagaccgcgtatcggatgcaaagcctcttggagaggcattgtgcaaaggcggactgcctgtggcggaggtcaccttccgtaccgaggccgccgaagaatccatccgcattatgagaaaggaatttcctgaaatgatggttggcgcaggcacagtcctgaatgtggaacaagccagacgcgcgctggatgctggcgcgacgttcctcgtagccccgggattttgccgctctgtcgtggagtttgcgatagacaatcatcttccggtctttccaggaacctgcaccccatccgaagtaatggccgcaatggagtataatctgtcggtagtaaagttcttccctgccctacaatacggaggacttggcacgatcaaggcgcttgcagccccatttccgtctctaaagttcatgccaaccggaggaatcaacgcttcgaatgtgctggaatttctggcttttgataaggttatcgcctgcggaggcagctggatggtgaaagacagccttattaacgaaggaaactttgaagagatcgcgcgtctgaccgccgaggcggtcacgctggtatccagataaagtatccgcaagcaacaataacaggaggcaaacttgctatgaaaatattagttacgccaacttctttacagcctggcaaaggctctaaggcgttggaaaccttaaaagcattttccgatgatcttgtattcaacgaactcagccgtcctcttacagaggacgagttgattcctttattaaaagactgcgacggatacgtggcagggctggattctatcacccaaaaggtgataaatgcctgtgaccatctcaaggtcatctctcgttatggcgccggatacgaccgcgtggatatcgcggccgccaaggcaaaaggcatcccggtaaccaacacgcccggcgtcaacgcagaagctgttggagaactcacatttgccctgatcctggccgtggcaagacgcattccctatctcaacgattccaccagaaatggggagtgggtacgcagcaccggaatggaactgaagggaaagacgatcggaatcatggggcttggcgccatcggcaaagtaaccgcccgctgtgccaaaggatttgaaatgaacgtcattgcctatgaccccttcatcaatgaggcatactgcgccgaacacggtatcggcatacgcgcttttgatgaactcgtacagcaggcggatgtcatcgcccttcacctgcccctcatggattcaaccagacatttgatcaatcaagaggccattgccaatatgaagcccggcacgatccttatcaacgcttccagaggaggcatcatcgatgaggccgccgcttacgaggcgcttaagtcaggaaagcttggcggcctgggactcgacgcttttgaaatcgagcctcccacaggctccccgctgttcgaactgaataacgtggtggtcacgccccatacaggcgctcatacccaggaggccactgatcatatggccaatggagcgatcaagaatctgattgatatcttaagcggaaatgaatgtccatatattgtaaataagtaaaccaaggcgtcccggaagttattctcataacctccgggacgccttggttcatatattcacatttcaggtttacaaatgtcttgccatcttcttaaaagcgtcttccagtgcaaaataacaggattcaaaggcctccttcacggggccatacgcctctactgccccggaatccggagtatgtacggattcaatattgatgaatctgtcgatagcggtaaagtctttaaagatgcccgttcccacgccgccgattactgccgcgcccatggaacttccctcttccaggagggatggaaccttgattctggcattgtatatatctgccatgatctgtctccacaccgcgcctttggctccgccgcctactaccgtgatctccttgatatccatctgcgtccgaagaatatcaaggcagatggaaaggttcatggttacgccttccagcacgcttcttagcagatcacccctggtagtttccggcttgatgccgatccaagcgcctttcgcgtccgggttccagcggggggcgcgctctcccagcaggtatggcaggaaaatgaggccgtttgcccccaccgtgcttttttcaatctgttcattcatatagatatatggagaggttccttcttcttttgccttataggattccatgctgcaaaccgtattctttagccagttatatgcccctcctgcatactgcatggttccgtttggcgcgtacatacccggaatcacatgcgcccaggttaccgtacgcatctgctcatcaaagatcggcttctctgccgtcgtcgtaatccatgcggatgtgcccatgcagcagtaggtcttgcccggggagatggagccgcatccgatatttgccacgacgccgtcgcctccgcccataacgaccggggttccctctgccagtccggtagccgcggccgcttcttttgtcacgccgcctgccacgaaagtggagggcttaatttccggaagcttgtccggatcgatccccgttatctgtagtatttcctctgaccactgaaacgtcttcagatcaaagcacgcgacgctgttagcatcggaaggctcagtataaaacttgccggtcagtttaaatacaatataatccttcgcattgagagtcttgtaggtctgctcgtatatctcaggctcgttgtcccgcacccacattaatttctggattccgtaagatgccgtatttcggtgtcctacgatatggtaaaaatcctgctggctgatatgctcctcaatctgtgccacctgcttctgcgccctctggtccgcccagataatcgagggacgaagcggcgttccatttcgatccacgcacaggcatcccatcatctggccgctgaaactgatcgccccgatctctctgggatcgactcctgtagactggatcaggctgctgcttgtcctgcatactgcgttccaccagtcatccgcattctgctccacccatgtatcattaaaatagtgggcatcatacgaaaacacttcgctctttatcaaccgtccatcctctgaaaataatgtggccttgttccctgaagtcccaaggtcatgcgccaagatatacctcaaccgtctgttcctccttaacttttattttccggaaatacggttacctcaaatttattacggtcaccgcgatatctggacaaggtatattcgattggctttccaaatgcgttatatccaatggaaacgaaatattgaattggctttccccgcttcatatccagtaatttcacatcttccgccttagcctctatggcttccaccgtacgctcgatcctgaatatccttgtctcgtccttctgtgaaagaatgctgtataactgctcttttaccaagtcatggcttaataagaaatcacattctttgtatggaaggtaagtcttcgtagttacgatgggttcgccgtctgccattcgcttccggtacaaaaagatgacggaatcgctttcccttagttccagcgccttcaggaccgaatcctcagcctccgtccccttaagcgtctttaactccagcacttccgtactcggcgtcatgcccgaccggtacatctggtcattaaaactttcaatcttacgtatgaattcctgggtgatctttggctgggccacataagtccctttgctcttcacccggtacagacgtccttcctgaaccagttccgtaatggcctgtcttaccgtagtccggctgatctggaatgcatcgctgatttccttctccgtcgggatcaagtctccgcttttataatgtccttccttgatctccgccagaatcagttccttcaattgaaaatataatgggatgggaaccgacttatcaattctatctgtcttgtctaacattgcaatatcctcctgatattcgaatatatttgattaaggatattgtaacatattggaaattctcccgcaagcatatcgaccactttgtataatcataactatgtaattatattataacataacacaagcagaattcaatggttttttcagtatttttttgtttataatgttttccatcctcttgtcttgctaaaaagtacatgatataattattgttataacattactatcttgtaacctgataaaataagattatggaaaaggagttatcagcatggcaaaaatgacacaggcaattatgacggaaccaggaaacatcatctaccaggaggtagacatccctgaggtgaagccggatcagatcaaagtaaagatgaagcgaatcggcatctgcggatccgatatacatgtcaatcacggaaagcacccttataccagttatccggtcgtccagggacacgaagtcagtgcagaggtcgtggagacgggcaaggacgtgacaacctgcaaggtgggcgacaaagtgaccatacagccacaggttgtatgcggcaagtgctatccttgcacgcacggaatgtacaatgactgcgaagtactgaaggtcatggggttccagactaccggaatggccagcgattattttgtagtagatgccaataaggcgctggtacttccagaagagatgtcctgggatcacggcgcgatgatcgagccgctggctgtcgctgtccacgccgtacgccgatatgctgctgacatgacaggcaaaaaggctgtcgtgcttggcggaggaccgatcggcaaccttgttgcacagaccgcaaaagcgttgggcgcagaggtcgtgcttctctcggagctcagcgcctataggcttgataccgctaaaaagtgcgggattgccacggtcaatccatccgagaaagatctgcttgaagccatcatcgaagcctgcggggaagaccgggcggatgtcatcttcgaatgtattggaatcaatccaaccatgaaacaggcgatcgcatatgcaagaaagggaagccatatcgtagtcgtaggcgtattcgcagatctggccaccgtagatatggccgccgtccaggatcatgaactgacgcttcttggaagcgcaatgtaccgggaagaagactacatcaaggcaatcgaactggttgccgccggaaagatcgaattcgagaccttgatcacccaccgttttggattccgggagttcaagaaagggtatgataccattgacctggaaaaggacaaggctatgaaggtcatgatcaacatggaagcataattctaagaatgccgcgcgacaggctatggagcctgccacgcggcatctttcgcctatcacttggcatcttttacatattcaaaggatgcatggttatctacgatatcaaatacctggtttcccttctcccaaagctggtatctgatcctgcatacagggctttctcttatgatcctcgtcatgctgccctgccgcggcgcgctcagcccgtaagaccgctctcctagcttggtcacctttaagcaaagttttccttgtcttaccaccgcttcgctggcgctaagccttcttactttcgcccccagataggtggcaatccgtaaggtccgccccggaatctctatctggcagatacatccccggaagctccaccttccaatcggtacgtctgccacagaaagcatcaggctccctctcttcttctccgtaaatatacattgtgtccagagatactccttcgggaaagaacttccccagtccgtctctatataccccagcccctcgttcagatccacttcccttccatttaccatcagccctcctctggttctgtgcatcatgctcagaacgccgtgattgcattcaagaaatggaactcttttaaacggccccataatatccttttttagcctggcaaacgggccataagagatatttccatagatggatacgtctttgttcttcagattgacccaggtgcctttttccgtaaacaggttctccccgatcatcacccggaagcgtcttctctcaatcgtgcactgggaggcgggatagaaaaagcaccaagagccctcttctgttatcatttgtatagatgccgtccattttccctgctcatccgcgtggatcgcggggataaaggcaatcatcctgccctctgcctggtgcttcaggtaccatccttcaaaatatggatattttttcttttttccatggtaatatcttgtcaccgtctatcgcctcctttacagattcctttttgtgcagggccaaccagcagatttccacgggcgtcaaaccttgagccatggcaagggcagtcatacgtcccttcttccggattccaggacaattggcatcccatatgggagcagcgggttgtcctgatgttttcttttgcgtcttctgaaagttttgacgtaccagcaagattggccaccgcgtgggcgccttccagggccatgtttcccattcccttaaggccaggcattctcaggggagagaagacctcttcataggggctgattcttccgcatatctgctcggaaagaaccatagcagccaccatggaggaggtcattccccatttcttaaatccagtggccacgtaccagtttttcctgccgccgctgtatctcccgatatatggaatatcgtccaggggcatgcagtcttgtgctgaccatcggtaggcttctttgcctcccggccagtactcgcccgccctttttataagctgctcatactgcccgccattcggattctctccggttctgtgtccttccccgcccacaagcagcaggcctcctgcgcttcgaactgacaggcttcccggatcgataccaagatacactccttctgtcaaaggcgcgttctcaagggcgatcacataactgcgttcctgatgcatccgcataaaataatgtcccgggataatcgggaacggatagtggcatgcaaacacgatattggaagcctttacatttccgcggtctgtctgcaccccgtcaggagtagcctttcgcaccttcgtatgttcaaatatttccacatcctctgagacggcctttaaaaacttaagcggatggaacttcccctgcccgtcaaaccggagggctccctgaatcggaaaaggcaattctgtcttttccgtccatcttgccgcaatcccaagtcttacagccgccatgaattcattatggagcctttgcccctgttcctgtgtatacagatacgaagagcagtcctcccagtcgcactcgatattcatcttacgaatgactgctttgtattcctcgatcgctttttcatttgcctgcgcatattggcgagcctgcttctctcccttggtcctgatcaggtccgcatagatcagatcatgctgggatgtaactttggccgtcgtgtttctggtctgtccgcttccaatacgcccagcctccagaacgatgcattccttccctttctgcttcaggaaatatgcagtcaggattcccgccattcctccgccaatgatcaccgtatcaatattcatatctcccggaaggcaatgccgttccctgatcgctgccgtatccttccagtaggacttatttgtcatagtcttcacctctcagataggatgcgcagcagctggtaaatatatgcagccaaataatatttgatagcaaaagggatggctttgccaatatcctcgatcaggaggcatgttcatgaaaaatcgcattttattaaaaacacggtagtccaatggcttcaggtcgtagcgagggatacctcgggagttgagccggcgattcatcctcacggattatgaatgggcaaagtagaaagccagaaaatgagtatccgcgaactgcttattcaagaatgtccagcgccttttgatattcccggggcaacagtacgcccaaatttgtacttatttttctgcaccttgcttttaattgcgaatcatcccatgtctcatccatagtcatctttaagaactcgtctgcctgaaagggaggatagatcgccttgatggctattgcaattgcattaagcgactcataatgatactttagcctcggtttttcttctgccaacgcacggtatctttcagcgtctcgtacagatcccggggctggtatcccagatccctgacggccttatcatgagaaaatttatcattgctttttaacgcatagagggagtagtctgtataaagcgggcgttccttcctgcgccttgcgtgccattgcatcagaggggctgcaagatgcgccatccagaacgggatgaccgggattcttctgcctcccgcaattcttcgcaccatcttcaatacctcctggatttcataatggcggtttgataggatgtagcattcgccgctcttccctttttccgcggccataaggcagccataagccacatcccggacatcgactagatcatatcctccctttacgcatactggaatcctgccgctaagataatcgttcaccagctggaccagatggttgcccgaacgatcgtaagggccaataatcccggaaggatggacgattaccgcatccagcccgccttgtaccgcagacagcactgcctgcgtggcttctgcctttgttctggcgtatcctcccactactttctctggagaaaattctttgatctcttttagaactgacatgctgtctgtatccggaatcgcatggacggaacttacgtataccagccgccgtacgccaaattcccgacacagcgcaattacgttcttggttccatttacattcacctcataaagaagcggcgagactttttcagaaatgtccacaattcccgccgtatggaagacatatacttctttcccttccatatcttcaaacagcggccgcagagactctatgtcgcggacatcgccttcgacgtaccggacccggccatcgttctctatctcttctcccggcaagatcaggccgcggatatctgcctcctgctttctaagcagccggatcaaagtatttcccagatgtccattggccccggtaacaatatagattttcttcatatcaaacacttctttcactttttgaacacagtattgtttatcctctatatctgtattataatattcctaacagttgacttcaatcgacagcttatatagggtttggatgacttaccaagatgctgatccgccgggaattcttggaactgctgcgcacgaagcccatgcagagcatctccatcaaggaactatgcaccgccgcgggcatcaataggggaaccttctattcccactatacggatatctatgcttcattttccatgcttcgcaccctttcctgtagaacaatttaccactacgggtaggatgttaccatagatttcttctatgtatcttaaatcccgaatccttctgcccatgttttcagttcttccgcacttgcatctgctgagaatctctttccttcctttaattctgctccgggacaggaaaccgccagctctttgtttgtgttccccatgccactgctacccgaagttgccagtggaataattgtctttccactcaagtcgtactgctccatgaacgtgttcacaatggtcggggcaacgtaccaccagatagggaaaccgacaaagacggcctcgtactgttccatgttcgcaagtttctctttgattgccggtcggcaatttgaatcgttcatttcaatggaacttctgctgtttttatctgtccagttcagatccgccgaagtataggtctgctccggtttaatttcaaaaagatcggcgtccactgcttaagcaagtttttccgctgcccttgcggttacgccgcttgcagaaaaataggctactaaaatttttttactcatgataaaatcctccatatttcatttattttctgacagcataagagaaaaatttttatgctgctttttttgaaacaatctttctcgttccgtttgtaatgtaataaccaacaaaaacccaaaagcccatcatcgccgcatattctgcaaacacagacacagcacttttttcaaaatcgaaaaatacgaactgatttttcaaaaacatataggacggaatatctgcactgataaaacagaacaatccatatccagcaatagcaacagcggctatcctcgcaatccacatagatatttcggcattgctcgtcagtttttccaaatttgacgcactggaaccgataccgctgccaccggaagtgcagaacggtataattgttttaccggaaaaatcgtagttttccataaaggtgctgacaattctcggcgcatcgtaccaccaaattcggatagtaaaacttttgttatgtaaaatagtcctttatttatcagcattttaacagtatacacacttttttaatctccaccttctgaacatctaatcttctacttcattgacagcttttccacttttcttgtcagcattatattctcttttttcaggcgttcattttcttccaacaacttttttatctcattctggtaaagctccacctgtttctccatacttttctctcggacttcccgtttaatctgcgccaattttccttgatctgccttttctctttcttcgtccaacacagattttacttcttcatttttgtaaaagaaccccttagacagtcctgtattttgtgaaagttcagacaccgatagacctttaccttctgaagaagctctgcgtatttcttcaacagcccgttctatttttcttctgctttcctggcgatttttctcattcatcttatcgtattttgccattaacaaatttcctcccagactgttttccatttttgcataatattccatcgtctttttcaccaattcttcatccagtaatccaatgtttttctttacaatttcatccgtttgataccccatataatcacggactacctgaattgaagcgccacttctataaaatgctttacatacttctttttggtagccattacctttaaatacatactcatctgtcaatataccaaactttctgcattgtttcataattgcactttgaaatcctccagctgtaaacctttttccgttattcaaaaacaatagattttccacaaatatgtggtttctatccgaatatttcaggacaagccaatgcaaaacgtctgggataggtatgcatctggtggtatccggtaccttcatccagctattctcattttcgtagtaaaagtccacattttttcttaataaatatacatccctgattcacaataactatttacaatttgatgtaccgcttttgctgttataaacactcttttgcaactatctaaataatcttcacatccatatttaaatagaatatacaatgttacatgttcgataacacatagcggtgctacttttttccttaatctcataacctcttcctttggtggattaactcgattatatccctatatgacttctgcgtttcttacgggttcttttttaccctctaaaataatttaagatttctcgttcacccgctcattcccagtcctatataaatatcatgttctaatgccagtgctgtttcttctgggaaaagtttattagaccatatcgtataaataagtcctgcatcataggctttttccagactcatataatattgatgtacttcataaaagaattcttgtttatcacttataatatcttgtttattcataataatatccatatatatttttcaatctttcttatttctcttatccgtgagtaaaatcgaataagaagctgataatttttccaaattttttctttttctacgagctcctttaatacttcctctgctttagcctttgccgtatagcgataccgaatcggaccaagcagcatataagtaatcttttccagcccgtctccgcgcatcggcgtggcagtcacgccatacacataacgagcatttacctgattcagtatattcgccatcgtattagaagccgcatggtgacattcatccaccagcaccatcccataatcattcaacttctcatggaactcgccttttttgcaaagcgatcccaccatggcaatatcaataattcccgtcatggaatcatgcgctccctggagctttcctataatactttttcttcttctgattcttcctgtttttgtctgatactccggcgtctcttcctctattttcaggaaactattcagtgcctcttcccattgttcaatcagtgacgaagattccaacagaatgagtgtgtttacttttctcgccgcgatcatagcgctgcacacaaccgtttttccaaatgctgtagcggcgtttagtattccggtatcgtaccgcagcatttcttccaacgccggttcctgttccggccggagctgcccggtaaattctgcttttatccttcttcccggctgcctttcgtccgtaatctcatacgtaatcccggctttcctacactgctcggtcaattcgtcatacaatcctctcggtatttctatataaccgctcagatgttctttccccatataaatccatcttgcattatcatagtttgaaagccccatcgccatatttttataaaaaaccggattactcacagcggccattatccgtatctgattctgaactgccggttgtatattcatcgtatccacataaatgccgtccgaaagcgtaaggcttagtttcccatctacacctgatttcaaaagccttgctctatttttccatggtttttcccgtgtttctgcatccttcccgctgctttcaacataaaaaatactggttgaagtccactcccctgaaggggcaatgcaatcaaatttcccagaccgcctcccggcaggctgtactgcgccgggagcatacggtcataatattgaaacgatttcaggtttactgtttccgctcctctttctaataaagcattcccgaattttctggctgtcgatgcggaaactgctttgtcgaaaaaaatccatacatgggcgcctcttcccgaacgcgaacgttccacaagaggatcgattccgttcagttcgcagattagacgcattgcttctacttcttccatccatgtctcaccgttattcgcaaaatcatttttttctgcatccttctcatggttatcaaaatcaaacgccaaaaaacgacaggttccgttcggaagcagtgggtaaacgcctatcacatcatttccgtaaggatcttttcctgccagatggcttttaatctgagcgatctttaattttgtccagtctctgtccggacagtccgtacaccgtatcttctttccatactttcttgggcagcattccttccagaaatgattacactgcggaaaatagccgacttctcctgtggatttctttacggtacgctttaattctgccgccctgattttcttcccacagtcctgttttctcctgatattgatatttttttagttcatttatataagaaattcccgaccgctcaaaattccctttaatatctggttttccaactgaagctcattcatacgcttctgcaataaagtaatattctctaatgcgtctcgcataaatttcacctcctcgcagataatttatcactgtgttttaccatagaataccataaatctgaggcaaatgcacccttatcgttttttgagtatgggtaatcgttaaaaatgcaccctttgactgccaagggtgcattgtatcaatttatggtacgcaagccagatcgaatactactattctttcgtaagttccggctgcatcggactgcttgaaaaatggcttgctgatggcatgacctgcagcgccgaagaaatcgcaaagatcgcggagaacatcatgatgagcggcattcacttcttatcagataagcgttgactaccactccgccacattgccatccggcgtccgccagacaggattgcgccaggccgcccaatcttttgccatctcccttactttttcctcattgacttcgatcccaagccccggtcctattggccgtttcacataaccgtcctggtattcaaatatacttctgtctgccagataatccagcaaatcggatccttcattgtaatgaatcccaaggctctgctcctgtatgaacgcattctgggtacagaagtccagctgcagacagctggcaagcgcaatgggtccaagagggcaatgaggggctaacgcaacatcataagcctctgccatagccgcgatcttccttacttctgatattcccccggcatggcttaagtcaggctgaatgatatctacgcctccgcccgtgatcatcgatttgaatccccatctggtgtaattgcgttctccggccgcaataggaatactggtacctctttttaattccatgaatgcttcctcattctcgaacaaaacaggctcctcaacgaacataggatgaaaaggttctaattccttcatcagcactttggccatccccttatgcaatcttccatggaaatccaacgctatatccagcttatatcccaacttatcccgtatgcttcctaccctttcaagcacatcctctaccatccggtaattatcaatccaggccatttcaggcgtggcattcatcttgacagctgaatatccttgttcaaacttctctgtagcggcttttgctacttccgccggacggtcgcccccgatccaactgtacacccgcatccgttcctttacggctcctccgaagaaatcatataccggcatgttgtgcgctttgcccttaatatcccatagagcctggtcgatgcccgacattgcgctggtcagaatcgggcctcccctgtaaaaggacccgcgatacagaatctggaagatatcttcgatattttctgctgatttccctttgatgtagtctcccatttcgtgaactgccgtttccaccgtgtctgctctcccctcgataacaggctctccccagccgacaattccgctttccgtcgttatttttagaaagcaccatctaggcggtaccttaaacgtctctattctttcgatcttcatcgctgtctcccttcccatacgttcatcatatgtacaaatcctctcagtgcgaaactttctcccggcattgcctcaattcctgcaacaggcagcctgtaccccgcactggaaagcagggttttaaatattatatggtagaccttagttcctgctacgataacgccatctagccgatccatttcacagttcttttccagcgcggtaataattcctgcgttaatcacgccttccagataagaatcccggcgcatcctgctttcctccgtgaataagtccagcgtccttgtgagataaagcgcacggttgattccttgttcctttgccattttaaatcctttggctacagcctcgctgcacaattcttccggacgcagcccgacggatgccttcaaaatggtatgccctgccattgcgctgtacatctctcctcccatgcaggaagtgattcttgtaatccttctgtcttgcgcgtacaggatatgggtatgcgagcctggcataatgaccgctgtcctccgtcccgcaaacagttcctgaaagtcccccatgatgccgaacagttctatttcttcacctcgtacattgttgaatctctccacattccccaaatctcccgggcgtttgcaaggcctgtccacaattccggtaagatatcccaccttccgatcaaagtacccggtataatgcattggtatcttttggctgtatacttttatatctatgggcaccggcagaaaatccacctcaaagattccgtctctggaagtcgccattcccgacatatagataccgtcaatctctccatccgtcaaactgttcctttttatcaggcattcatacgcctccttcagccctctggtcagaatatggggatccgatgccgccacgttattgacggtaccgatatttttgaccattacatccttgcttttcttatcttccacgagatatagcctggaatttgtggttcctgaatctatatatacatacctcatctgcgatcctcctaatccgatattcttttattccgagaaaaaccttcttggattttctaccatgattttggaaatatccgattccgcaaaccctttttcccggagcataggaagcacgaaccggtgtatatagcgataattatacggtacatcatccgggtcggttccgcacacattgcaccattcaaaatctccaatatccacaaagctcacataatcatgggatatcattatctgccctatatatcccctgtcgcaaagttccatcagcgtattcacccggtcttcaagaggattcttcgcatcatccccgaatcggtccagtccgatatagcagccgtgacgcagcagttcctccaggtatcctatgtcgttggtatcgccgcagtgtccgatcaatatcttcttgggattcagtccatgcttttcaaatatctccatctggctgatcccgctgcggttcttaaaataagagtgggtgccgaccggaagtccgctttcctttgccgctattgcatgggcttccagcaagttcctgtttatctctgtcactccctgcacatctgtcgcgcattttatcagccctgggcgaatatctgtcccttgaatccctttttcaatatccatcatcaggtacttcaggatacttttgacgcttctgccatacagccactgattctccgtatgaaaaaagcctgtggatgcgatcatttgcatcccggtcttatctgccacatcctttatagcatgaatatcgcgtcccaggcagataggcgtctgctctaccagcgtagatattcctatttcccttgcccgtttcacatcttctacagcatattcaataaattcatcataagcaagccattctttatatgcctgccgcatagaccagttagcctgcaggatatgttcatgcatcagcgttacccccagctgatctgccgccagttctccatttactgaatgaatctccttattcatcactgttcctccttgtttccggaatcctgctacaccatctgctccgtcctgctaatcagttcttcctgcgctttcttgcccatctctacgaaaaatgcactatatcctgtgacacgtacgcaaagggttttatacttctgtggatctgcctgcgcatctctaagcgtctgcgcatccaccacatttacctgtaactgcatgccgccattctccatatacgtctcaaacagcgcgcacatcacgtcaattccttcttctccagcgaccgcggaaggatgaatcctcaggttcaaagggcctcctgtaatatattcaaaaggtatcctggcaatcgaattcaacattgccgtaagtcccgaaatatccgtcccttcagcaggagactggttctcgctcaatggctctcttgctctccttccatccggcgttgcccctacatccaatcccatcgtcgtaaagtccctgtccgtggaataggttggccacatctggtacaggtattcgccgccattataggcattgacagcacggatgaagatatctgttaccgtcttggcatatttgtctaccgcctctatatcgtttccaaacttctccatgcgcctctttaatttcatagccagcatttcctgtccttcgaagtcgcttcgcagcacttcggctagctgggaaagggacatctcatgattgttgaatacgatttcttcaatggcatataaagagttgatcaccgtggcaatgccgcatccttgggtgacgattttatggtatttcgtgccgccttccgtccatgtaaccttattttcaatggttcctttcaggaaacagtcttcaatcctcattttattcatcgtgcattcctgttctacctgaaagtccatttcgaagccctttctgaattctccgatcaggtaggccagctgtttctcgtactcgccaaggaattcttccattgattctatctcatccggcgctttcgtcttaatgccatagtatggccccgtcataagtcctgtcatgcggtcgtcaatgccaaactgacattgcctggcctctccttctttccttggggcaagcgggcaatccccttgatttagcgcaagttccaatggcctggccagattgatccacacctgcctaagcccgccttcataagccgggatgttggggtcattacagccaaagaatccataatcgtatacctccggctcctccacatgaaaatatttgagggctggaatcatcgtctcatcattgtagattaccagggtcgtgttatcccgcatcgctcttatgctgcgccgccagaagtcctgcgggattcccttatggtaccgcaccacgataaatgggttccgtagtttcagatcctgggccgcttctaccatcagatccgacaattcgttcacgcccgtactcccatccgcccttttgccgcccaggatcagataattcgggtcatcataggcaacttccagcgtataagacgtcgtttccgtttcctgggacatatggtctgtctgcaccatgatttcgttattcttaaaatagaattcccgcagaaggcttagggcttcgttcctggtaatccttccttcctctatatccctgcagtaatatgggtaaaggtattgatccatcctgctgaagttcagcacgccacacccacacactttctgaagcaccagcgtcagaatccaaagcagctgcaatgcctgggcaaatgtagttgccggacctctggcaatctgctccagattctccgccaggtcgctgcgccctgtttctgccgctgccaggccgtaacgttctatatagcgttccagagcatcatagcacaggatcgttcctgtaaggaatgtcctctgatcctctgaacagtcttcttgaagcccatccctggctttctggcacatctgctccagcccctgattcagaatcgtctcccagtccattgccagatgcccaaatgaggggaaccagtagggcctgcacttaagccacccctgcgaataatagaacaggatcttcttgtgccgttcttccgtcgggatatcccaccagtctttgtaagccttcttgatcctttcctcctcctgcgtggacggaacccgcatctttaccgcgcctgcgatctgttcatcctccctgatgacgactgttattccatccagaatatgtgccatcgtatgcccatattgaatggctccttcttctcccgcaaatagcgtctctgcttctaaaattctttcaattcgctccatgaatgtttcccggtaatcccggtcaaaccattcgtccatctgttttttgagatattcttctaacatcttagccccctcctttcggttatttccgaatccactgcttcagcacatctttcagttctttcatccggtcctctggtggcgcttggaattcttccatgggaatctccagttcttccgcctttccaattcccattccatggtaaggaagaaggcgcacctcctccacacaggaatagccggttagaaaatcccttaattctctggcgttgttaagcgaatcgttcacatcagcgataaccggcacacggacatgcgtccggcagccgctttccagcagcctcctggcattcttaagaatcaacgcattcgatacccctgtgtattccctgtgctttgcttcatccatcatctttatatcgaggagtaccaggtctacatagggactcacttgctcaaaagtctcataaggaacgcaaaaggcagtgtccagcgcagtatggattcctctttttttcgcctctttcatcaggcttgacacgaattgtggctgtagcaacggctctccgccagataccgtcattccgccgccggatttttcaaaatactttctatctcttaccactacgtcaagcacttcctccaccgtcttgttctgccccaggcatgtcagggcatcgaagaggcagttcctggcgcattggccgcaagcagtacagcgtacagtattaatacgcttcttatcctttacaaatatgccttcccggcacacagcggcgcatgccccgcattccacgcacttatcaggtgaataccttatctgtggctttgcttcataggattccgggttgtggcaccagcggcatcgcagattacaccctttcataaacacggtcgtcctgatgcccggtccatcatgcacgctgaatctttgaatgttaaatatattaccccttaattcctgcattttttacatattcctttgctaattccgttatcttatccagatggccatccagaagatattcccttttcgtaagcattccgccaacacctgcgccgcaggctcctgcatccagaaattcacggatgttatgctgcgatacgccgcctactgccagcatgtcgatatggccaaggggcgctttgatggcctttatatatgcgcttccaaggctgacagccggaaatatctttacaaagtcagcgcctgcattataagccctgactgcctccgaaggactcatggctcctggtatggataccattcccaattccttcgcatgccggataacttcttcattcgtatccggggatatcatataagaagcgcctgcatcataagcccggtccgcctgatctttgtcaaggaccgttccagcacctgccagcaccttccccttaaactcgctgccaatccttttgatcgcctcggcagtcttataaaattcacttggacttttctggtcaaaagtcacttctaccaattggattcccccggcgtataatgcttccgtaagccgaaggcattcttccgggtcaaatcccctgatgatcgctatgattttttccgtctttatcttctgtataatctcttcaacagccatgtcctgcttcctccttttagaaacaccggcgcaaatcttacgtttgggccggcgcttaagagttactcgatattcctgtgattcttctccatatcctcataagtcatccccagttcatcctttaatagaatcgtgatgacatcaagcaggagatataagtgctgttcatactggttgcccatgggctggatggttgcggccacatcatgctgctttggagactttagatcatccgctgcctctgccatgtagacggttgcatgcacgaataacagatagtccgcatagttcctggccagattcccttctggcaggcaggtcagcatggcgatcttcgcccccgtctttgaagcctgtcctacgattcttctgtggattcccacatcgcctctgccatctgttataaggaacaggtcgccctcatgcatgcctaccgtcgtatcatccatcagccagtaagcctgctttccaagatgagccagccgcatggcgaatgaacgaagagaaatcccttcccgcccggttccatgcaggaagatacggtttgcgttaatgatcgcgtccataaacgcttttaactgctccatgtcaagaagtccaaacactttttcatgctctttgatgatcgccctgctatattttttatacgtctcaatataattcataagactcctttccctatcggtttttggctacagtacagatagtttctcctcatcctgcgtgatgatgatcttgatcgcttttctgcttcgtaccaggtcgaaccctttcttccagtccttaagcaggatatggtgggagatcattccctttagatctacttttccctgctttaggaggcgtattacatttttccaggattgataatcgtatccgaaatgtcccttgatactgatgccccggtccagtatattgtcgaggctgtagccatagggacggctgtcataaccgattttcacgatctctcctcctgtacgtacgacatcgatcgcctgtctcaggacgctgttcacccccgccgcatctatcgcgacggccgctttttctccttcggtgataagatccacctcggcggcaacatcctgcgcgtctgactttatgatatgggtagccccatatcttctggcgatcttaaatctttcctcatccgcctccaggcctaccgcaatgatattggcgcagcccatcacccttgcgatctgtatggagaatagccccagggggcctacgccgaatactacgatgtcttctcctggcatgatccggctttcctgcacgatcgccttatatgcattgcatatcggatccagaatcgctgcctcctcaaaagatatgccatccggtattcgaaatagcgtattgggatcctttgtcagaacatctccggtgatcttaacataatccgtaaatcccccgtccattccataccccaggcctttacggtccgggcagcttagaaattgcccggtcgcgcacgcatagcatttgccgcagacgtatcccgtattgtcagatactacccggtctccctccttccagccttttacattctttccagccttgcagatgaccccggaaaactcatgtcccagcacgaccgggcagttcaaatgtcccggatggtccccgttgtcatatgcaatgtcagagccacagatacctgctgcctttacttcgatcaatagatcatcctcgctaatctgcggtaccggcacatcccttagttgcgtctctcctctgcctgtcccatattttactaatgcaagcattgcgctcacccttcctttctatgcagcctggcctgcctcttccccttgccggtctgcgtttccttttttcttgatatggaatacttctgactgcactccaatagatatcagcaccagcacgcccataacgatattctgccaccaggaattcaggcttcccgcataattaaatatcgtattgatgatagatataattaagatgccaaagaaggtcccactaaactttccttctcctcctgagagttttactccgcccaaggcgcacatggcgatcgctgtcgtctcccatgtatctccggccaccggctgcgccgtgtacagccgcgctgccagaagcattccggcaagggccgcaaaaaatccgcacagcgtgtaggccgcaatcttaattcggtccacatgaaggcccatcatcttggccgcctcctcgttgccgcctactgcgtagatgcccattccaagtctggtatttcttccaatgtacatgcacagcagagtgcacaccgccagcaggaagatcaggacatttacccccaggatctttcctcctccgaacccagtcagtaccggattgctaaccggaatcgggcgtttgttggtaatcagcagcacgatcccccgaagtcccagcatcattgccaaggtggctacccaggatgatatccgcatctttgctaccataagtccgttcaggcagccgcacagaagtcccccggacagtccaaggatgattccaaggactggattatccgccccgaatattcccattaaaacgccgcctaacgccagcgtagagcctacggacaggtcgatctctcccaccagtatgacaaatgtcattccaagagcgaggaagccaccgtcactggctgctttccttaccatattctcaatcgaattggacgacaggaagctacggtccgcaaatacgacgctagcgaatatgaatagcagcaaaaacgcggcaatcgaactttttgagccaaaccaactatatgctttttttactttgttcatcttcccagcctccttacgccgtcttttcgcgctggatatataccgcgacgataataataaccgccttcatgacctgcgcgtactcatacgttatattgttcatattgacggatatggtaatcaactgcatgatcagcgctcctaccacggtgccaaatacttttgcccgccctccggacatgctggtcccgccaactgcaactgcggcgattgcatccagttcagccagaagtcccagagaatttccatcggccgcgccaatcttagccgtctcaaagatgccggcgatcgaggcaagcagcgcacttgagatatatacgaacatcagcgttctgaccgtgccgatgcctgccagagtggctgactttggattatctcctacggcctgtatataacggcccagtaccgtcttttccagaataaaatatgtaagggcgaccgctagtatgatcgggattacttgcaccgagacctttccgaagagcttcatcgatccaagcaccttatatgtctgggcgtgatctcctacaatatagaagatcttcgcatcattgatcacctgcgccacaccgcgtacgcctattaacagcgccagcgtaactaccatcggctggacgcgcagtttccctaccatgaatcctgcaatgattccggataaggaacaaatgacaagcgaactgagtatcgcaggcaatagtccgaatggcagcaatttcgcgcttacgatccccgcaagagccataaccgctcccacagatatatcgattcctcccgtagatataaccatggtcatgcccatgcctgtcagaatgatcgtgcatgactgggtaattacgttccaaagcgttcccgggctgaagaagtttggcgtaacggccaagtttacaataatcatgaaccctaataatatggcagcgctatattttttcaacacagcggcagtgtcagccttggtcctgacctgactattcatttgcaagcccccctttcttctccagttctccggcgccactggcaatcgtcaccataatggcgtcctgattgatgtcatctcctaccagttcccccagtttgattccttccctcaataccacgaccctgtcgcagtttctttccagttccgcaatctcagaagatatcatcaatacgctgattccgtttgctgcaagttcctgtatcagggcttctatctctgccttcgcgcctacgtcgattcctcttgtaggctcatccatgattaccagtttcggatccatgcagagccatctggcaagcagaaccttctgctggttgcctccgcttaagttgcgaattggctgattgggtgacggggtcttaatcttcaaacgctctatgtatttatctacgatctcggcctgctttttttgctggactacgccatacttgctgatatgcggaagcagggcaatggtcatattttccttgacagacagatgcggtatgattccctccaccttccggtcttccgtgcagaatcccatcccgcgctggatcgcgtcttttggcgttcgaagcctgaccttctcatccatccagaaaacctctcctttgtcaggctgctccgccccgaacaatacttttgaaagttcggttcttccagacccaagaagtccggcaagccccagtacttctccctttttaatatcaattccaattccattaagcctgacgccctggcggatctccttcatctcggcaatcttttcggcatccttgaacttatagcccgtcttcgttctttctaactgcttggcttcacgcccgatcatgtaggagatcagcttgagctggtcgatctcgtctatccctaattccccggtaagcatgccatctttgagcacggttacccgctcgcatatttcaaagacctcgtcaagcctgtggctgatgaagatgaccgcgatctgcttttctttcagttttttgattacgtcaaaaagcacttttacttcttttgtatcaagcgatgaagtgggttcatccataatgacaagcttggcattgacggagatcgcccttccaatcgctaccatctgctggatcgcggttccgtagttctgcaaaggcaaggttacatccacatggattcccagttctccaagaacttcttcgcagtcctttttcattttctttctgtcaacagcgccagccttattgcgcggctcgcgtccaaggtacatattctcatacaccgtctgaaatggcaccaggtttaattcctggtatatcgtgctgatcccttccttctgggcttcgatagcagtcctcggatgaatctccttgccatcaaacaggatcgctccctcatccttctggtagatgccagtcagagtctttattaatgtggattttcctgcgccattttcccccatcagcgcatgtacttctcctttcgccacggaaaaatctacgcctttgagcgccttgacgccgggaaagttctttacgatccctttcatttctaacaacaattctctagccatatattctccactcctgatcttctcaagttaaaaacggccattgaggcaatggccgttttccatctagaatcctaaagacacatccgcattgtcaatatcgtacaatgtatcttcattcgtcatctccgtaggcacttcttcgccagcatttaatttctcaattgtctcgaatacaattggcccaaacagaggcgagcatgaacatgagcaaagttgttcgcctgcaaggattgcctccattgccgctgccggcccgtcaatgcctgcaacaagaatatctttccccggctcgtaaccggcagctttgatggccgtgatcgcgccaagagccatgtcgtcattgtgcgcgaataccatatcgatgtcatcgccctgcgcctgaagaatgttctccatgactgcctgtccttctgacatcgtataattcgcaacctggtcggccactaccttgatatccgtcccttcgatcacctccgtgaatcccttctgcctgtcattggtggaagtggctccctgtgttccctgaaggattacgcagtttccttttccgccggtcacttctatgaacttattggctacctgctcagcctcccatacgaagtcagacatgatggctgtggtgtatacgtcccctggctctccatttaccccacggtcaaccagaatgaccggaatatccgcttccattgctgacttaagcgctgcctggagtccatcttcttcctgcggagccaccaccaggtagtccacgccctgggctaccatgtcctcgatatcagaagcttgctttgcaatgtcgcctgacgcatctgtatatacgaattcaacctcgtttttctccgctgtctcctgcatgctctccgtctccgcaatcctccagctattgccgttatcgcactgggagaatcccaccttcaatcctttcagtccatcccctgcggatttgccgtcgctctttgcttcagtctttttgtcatttttttttgcaacatccgaacccccggaactacagccaaagagcgctacgctcatagacagaaccagcaatactgctaacatctttcttttcatttcattttcctcctttgatttgatacgcttgataggattattttaaagaataataagcctgtttagaatcaagtatttcacaattttctttcaatatttggtttgttctccttccggtaggccgaaggcgacattccctccaggcctttgaacaccgtgctgaaatatgtgggattggaatatccgcacatcatcgcgatctcataattcttcaaatccgtctcaaccagaaatttcctggcctgctgtatccgtatctccgtcaggtattctatgaacgtctttccggtctccttcttaagtatgatccccagataggacacgctgatatatgtctgttttgccacatctttcatagacagttcctcattggcatagttctctttgatatagtccgtaatgcgcttcagaattcctttcgtcctcccctcccgggcttccataaaatatgtgttgatcatcaggcaaatcttctttaaatatccaagcatctcttttctcttggaattctccagcatcttatggtaatgttccataggctcgccaagaatatcgttgatattgccgccaatctcctccggtaatttggtaagttcaaagtatagattgctgatgatcagcacaacatgcatatgtgaaaatatattttccctctgcagttccttctcgaacttttccagttccttttccactcgttcctttgtaccgctgcggatctcatggaataaggtctcggcatcatagttcatatatttaatcttcgtatctacgtcttttctgctcttagcaatctcatccagcgtataggcatactgcctttccctgagctgcctggcatacaggtaggaatgatacagtccatggaatccctggtatacatgcccgaaggcatactctacctcttccattgcgtcctggttttctttgaattttctcttgatttcctcccgcttcttcctgcaggcttcctctgttgctcccctgatgcataagagcctctcgcagttattctccttcaatatatcaacggaatcctcaccgggcagatactggcgtatcctgctctcaaaacgaccatccatctcgacgatatccagaaagtcgcagtccatggatatcatcgcaaagtcacgccggtccgcaatccccaccgcataatatagcctggcgtattcttccgcgatcaaagaaggcgtgtcattccattcttctacaggaatcttgtgcagcaatatcttgccaaagatattctgacgtatcgacggcttgctgctctcttccacttcatgaagccggaaccattcccgcttcctgcgcgctctctcctttaattcctggttcagattcttaagcatggcctccagctgctttaaattcaccggctttaggatatactctgacacgcctgcctttaatgccctgcgagcatactcgaagtcatcatacccgctgataattataatcttgatgtccggatactcttcctttagtttttctgtcattgtaatgccatccatgaaaggcatcttgatatccgtaaatacaacatccggcctcttttctttgatcaattccagtgcctttttcccattatccgatgcgcctgctacctcataccctattttctcccagtcaaaacatgttcttaatccttctcgcagcaagtcctcatcttccactatcacaactttccaggccactattctcctccctttctcttcggtatcgtcacatacacccttgttccttcccctatcctgctgtcaaagcgcagtccatattctaccccaaagtacatgcttatccttttctgtacattgataatcccataggctgccgcatcatgatcggtcccttcatccatcattgactgaagtttcttcagtttctccccggacatgccaagcccggtatcctccacgcaaaacacgatgttgtctccctgctctttcgccgtaatccttatcaggcccccttcttccttttccttcagcccgtgatacaatgcattctcaaccagcggctgcagcgtcatttttatgatatcgtattgataaagttcttcgggaacctcaatttcgctttttaggatacgctcatagcggattttctgaatcgttatatacttttccacgtgagtcagctcttccctgatactgataaaatgcttgcctttgctcaaactgatccgaaagaacatggtcagcgcatctatcatctcttctactttgtccgtccttcccattcttgccatccagttgatcgaatcaagcgtattatatagaaaatgtggattaatctgggactgcagcgctttgagttccgcataccttaacttttcctggctctcgcgctcttgttccatcaacatcttgattcgctctatcatatggttgaaactctgcgccagttctccgatttcatcttctcccgtaatctccagctggacgtcaaagtcccctttttccacctgcctcatcgtcgtacgcaccttcttaatcggattggatatattgtccgcccctaccagcgcgaacatcaccgccaatgcgccaaagagaagcatggcgcagatgatcgccgtcttcagcctctccgcctggacaaataccttgtcataagagatgattcccaccgttttccagccattattgctaagtcgcatgctagaatacaggcaggtctcgtctccaatctttatatcattggccgtgcccgtattatccacagactttttggcaaatgcctggtttaccctctctatctcctcgtcgttgtcgcttccatccgaatagattaccttgtcattatcatccagtatataggacttaccttcaaataccagtccactgtccccgatctgcttcaggctgcttgcctttacatctaccacgacgacacccagtattttgctggacagcctgtcttcaatgggatagactactgagatcgtaggaaaattaagattctgcacgatatccgacccagggtgcgggttcagccacagttcctctttcgcttcgacagcctccttgtaccaggattcctgccggaactcctgtttcctaagcgttcgctcagaagaacggaaaatcgctccattggcgcctatcacgtacatgccgtcaatattgacggtatactggttcatgaagtttaacttgtaattaaaatccagcctctgcttataccgttctttctgagtctggggtaaaggctccctaagctgcatctgtatttccccgtcccttgagacgttgtaggcaatcctctttgcctcagaaagggatttataggtgtccgtgttgatctgttggatcgttttttcaaccgaatccgccgcaacgcgatacagcccgcttaccgtcatctgataaaagataataaaactgatcagcagaatgataaacaacgtaaaaaaataagccagcatctttgacttgatagaccttaatcttctcatatgcacctccccaatagtaagacaacatcacgattatactgacaattataaagtaagaacattataacatatcatcctatagcactgcaatccagcataagttaaggcacaaaaaaagcagcctattcccatggaataagccagttcatggctaattaaagggaacaaaaagaaaggaaaaaccaatccagacggtatcagcggcaggctacaagaataaattgtgatttcacaagattggtgttataataagggaaaagttcctgccggggtagctgccccggtggtatggatagaaaggcaggaaaacaatatgtacatcagctataaaccactctggcacacactgttagagcgtgatatgaggaaagaggatttaaggctttccgccggtatgacaacgaatatgattgccaacatgagcaaagagggaaagcacatcagtatggatacattagcccgtatctgtgaaacgctgaattgtgagattaccgatgtgattgagttagtaccagacaagcctacttccacaggaggtaaggaacatgagcgaattgaaaccaaaaataacggaaaacggaattgattatatccttgtcggagattactatatcccggatttgaagctgccggaggaacaccgccctatcggaaagtacggacggatacaccgggaatatttaagagaagtccacccagccagattgaacacattgaccttgaccggagagttatggacataccttgcagacctgaatgaacaggcacagaatcggttagataccatcatggaacagatgaaagccgccgagggtgtgacagaggaattgaagcgaacccaacaaatggaatgggtgcagcgttgcaataacattcacaaccgggcagaagaaattgttttgtatgagatgatttattcataacggtatagtagaatgattatgacaaaatagagtatgaagggggcatgaaaatggcaatttcaaatataaatgcgattatcaatgatgatattcataaagtttgggatattgtttttgctgttgataaatatagtgcatggcgaagcgatttaagcaaaacagaaatcataaatgacaagcaatttattgagtacacgaaagacggatatgcaactacattttctattactgctattgagccatataaacgctgggaatttgatatggaaaatagcaatatgaccgggcattggactggtatttttacaggtaagggaaatgaaacacaaattgattttacagaaaatgtgatacctaaaaagtggtttatgaaaccctttgtaaaactctatttgcaaaagcagcaaaagcaatttgttctggatttaaaaaaagcattggaataacaaattttgtttgaggtggtatgaaatggttaaagtgataagggaaaaatttgttgtcattggaaaagaggggtcaacattagacggcgaaggatttattcagaaattatgggatgatgccaatagtcattttagtgaggtagcacatctggcaaagaaagactcaaacggtggcattgtgggaatatggggtgctatgtctgatatttctcgctcatttaaaccgtgggaagatggatttagtaaaggcttgtatctggcaggagtggaatgtattgataatgcagaagcacctgatggatggataaaatggacaataccaagttatgagtatatagttgttgaaaaccataaaggaatgtttgaagaaaccattggacaaatgaatgaggatggtatttctcttgtgggagcagttcacgactataccgacccagtaacaggaaagggctatctgtatttcccgataagagaagtttaataaatcagaattgaggtgaagtcatggcgtccagtaaagaatatttagaatttattttaggacagttatccgagttagaagaaattacttatcgagctatgatgggagagtttatcatttattatcgtggcaagattgtaggcggtatttatgatgatagattgcttgttaaaccagtgaaagcagcaattagttatatgccgacagctccgtatgaattaccttatgagggagcaaaacagatgttgttggtagatgaagttgttaataagaattttttagcaggcttgtttaatgctatgtatgaggaattaccagctccaaaatcgaaaaagaagaaataagtaaattccagtttgtatgaggattttagaatgaaagattggtttacaatagataagattgataaggatacatatataattagcgagtaccgccattgggaggaaacgcattgctatcttctgaacggtacagaacatagtttgctaattgatacaggactcggtatttacaatatttcagaagtggtttcaaggttgacggataagcctgttgtggctgttgcaacccatatccattgggatcacattggtgggcacaaatactatccagatttttatgcacatgaagcggagttggattggctgaatggcggctttcctcagccgttagaaacaattaagggatatgtcgttgaccgttgtgaattaccagatgattttcatatcagcgaatatgagttttttcaaggaaaaccgactaaagtattacgtggtggtgagcatatcgacttaggcggaagaacagttgaagtccttcatacccccggacacgcaccaggacatatgtgcttttgggaagcaaaaacaggctatctatttactggcgatttggtttataaggacactttgacagcatggtttccctctacggacccggaggcttatttgaaatcaatcgaaacagtagctgcccttcctgcaaaaagagttttccctgcacatcactccttagatatacagccggaaattttaactcgtatgcaaaaggcttttcgagaactaaaggcaaatggacagcttcatcatggtagcggtacatttgattatggggattggtcagtatggctgtaaagcaactcccagtttgcagaactggcagcccatctacaattaaatcttcacagcttactaagcaggagaaccgaaaaagtctcctgcttttttgcacccaaaatcgaatatggaactttaaggcacttgctgttttcactttgaaaatgacaggtgcttttgctttaggaagcaagaaaaaaacttccattctttatgttgatgaagtataatgtaagcaacaaattagaagttgaggaaaagaaagaatggaagataaaaagatattgcttgataatattgataaaattcatacaaccgaaatgggaattgatagaattaaaagaaacctaaaaatagatacagcagatgttgttgagtattgcaaaaataaggtgttagataaaaattgcaatatatacaaacagggtaaaaattggtattgcgaagttgaaaatatcaaaattactatcaattcatatagttatacaattatcacagcacatattgttaagtaaaatcggactttggagtgaaattatgggctatataatacgagaaatgagaagtgaagaatactgtttattaagtgattttttgtatgaagcgatttatattccagaaggaattgaaccgccacctaaatcagtaatagaatgtccagaattacaagaatatatcgttgagtttggaaatcgaaaacacgataaagccttagttgcagaaatgcagggaaatgtgataggagctatttgggtaagaattatgaatgattatggacacattgacaatgatactccatcgcttgctatgtctgtctacaaaaaatacagaggattaggcattgggacttcattattgaaacaactattacaggtagaaagattggctggatattcaaaaatatccttatccgttcagaaaagtaattatgcagtcaagatgtacgagaaagtgggatttactgttgctgatgaaaataatgaggaatatattatgattgtaaatctataaccaaaagctacagtttaccgaactaaactttcaactgaataaccacagcacaaaccgctgctacatggaagcaaaaacaaccatgcaacagcggtttttctttaccgttttttcctctggctgataggcgttcccattttctttgatttttgtagaatccgaatgagccagcgaaattcttcttccgataaatttttatagttgataccgagctgcttgcagtaaagcactgccagtttttccaaacggctgcccttgaaattttcgactgcttccagattttctttcagttcatcggcaacggtggtctggggcgcactctcactgtcctttttatgggtttcccgaatatcccggataatcaggtttaggtcatcctgaaccatgtggctgaaatattcatcatcactgatatgggcagcttgcagcactttcaaatgcgggtcatcttcgccgggacgataccgttcaatgatttcatgccggacagtatcgacaagggcattgaggttttgaatctgcatggtggcaatcccgtccacataaatctcaatgtccgcaagaaacttgataaaatccttatgggtggcaagttcgcagagcagacggttgttaatccgaccgctttttagaagttccaccatttcatcatttaaatgcagctccgttaatggcgtgttgatctgctccttgttctctgtccggcacagcagataatcaacagaaaccccatagaagtctgccagcgtgataaggttgccatgattgatttctttataatcctctttctcataatttccaagagctgatttggaaatgcccgtcagctttgatagttcttccagatttaagcctttgtccttgcggagttcccaaaggcgttcttgtatggtagttgctcctttcatggtcgcacgctcctttccagcggtttcattgctgccgtttaactggattatatcacactttccgcaatcgtggaaatttctgatttttacccctaattcctactttgtggacatacggcacagggcacaaaaatgttctatgatacaggtagttcatcgatggattattccaatcgaatgaccagcctgtgtgggatatgcttccccggcgatgtagcgccatgacttttggcagggatgtggaggaaccctgaccaaaacgagcgtaccaaagggagcgatacgccgctgtgagattcaggggaggaacgacaccggggagaactggcggactgacaccgaaatgataccgaaacacgacaatctgatagggggatagtctaccctatcgctaatacttcgggagattttaagcggctctatgaccgtaattttgccgaaaatcgccccgaaaccatacacaaaaacgggaggaagcgtaatatgccgagaatgagcaaaaagaggaagcaggagctttccttttatctcaatgaccgggggcgtgtcacttacaacgaattatgccggaaatgccagcatgggtgcaagcagagcttccgggcggttgtgattgactgcccccgttatttatccaaacgagcaaagaaaaaggaggaacacagcgaatgaattttgaatttatgacgatagacacacccttgccgccctgtatgccctttcccagagcgttgacaggatttccggtcagcagcaccgcaaaggtcatgtactgccggatgttggacactatgctttccaaagggcaggaggatgagaacgggattctgtttgtctgcttccccatcacagcccttgccgccgccctgtcccgcagccccatgacggtcaagcgttcgctgaatgaactggaaactgccggacttatcatgcggatgcatcagggcgttggagaaccgaacagaatttatgtgctgataccgggaaaggaggacgctgcccttgcctgatacttcaaagctggaaaagctcaaccgggagctggagaaaagcgaaaagaaactgcgaaaagccatcaatgatgaaaaggcattacagcaccagttaaagcagcttacccgaaaggaacggacacaccggctctgtacccgtggcggtatgctggaaagttttctgcaagagccggaacgcctgacagatgatgatgtcatgttgttgttgaaacttatttttcacaggcaggacacgcaggaactattgaaaaaattgctggaacgggagaagccggaaaccccttagtttactaagggcgcaattatacaccacccagaggttggtgcattgcgttctccgaaggctcctcgccggagggctgtgattttccgcagtcatggtctgctccaaatcaaacaggggacgctacgcttcccctgcgctggctgccgccagctacccttttgtggacttgccatctggggacaccttgcacttcaagctgttcccagatgacaagtaaaatatagcttgacttaaaatttttattcaattacccttaaataagagttaccggtagctctttatctaatcaataaggagcgtgtaaaaatgtatcatgcacattttaggggaacacactacgaagctggttttcggtggggttccttactgttaaaacacaaaaatataattttggagaacataccgtttgaaatcacacaggagcggattgactatgctttgtcctgccttccgatttatgaaaagtattaccatgagattgtggaagaaattcaaggtctggcagatgggcaacaatgtgatgtccgtattttgcaagctgtattatttagtatgtactctatgccgccgtcttgtaattgctcttgttttgcttttacaacgggagaggaaatttttctgggacgaaacagtgatttcctaacagaaatcgaaagactaaatcagaatgtaatttataaattaacagatggagtttactctttcacaggaaatacaactgcttttgtggagattgaagatggtgttaatgaacatggtttggctgttggtctaacatccgtttatccttaccaatgcaaactgggatttaacgcaggtatgattgtcagatacctgctggagaaatgcaaaaatgtatcggaagctgtctcctgtttatatcaactaccgattgcttcagcacaaactttaaccttagctgatacaatgggggcgatagctgtaatagaatgtaatgcggaacagataaaagtagaaaaaacattgaatagcaatctttcttttgtctgtgcaacaaacacattccatctgccagaaatggtaggctataacaacgataaaattgataattggtttgcagaagaacggtatcaaacattgtattcagctcttagcggaaaaaatggaggtttcaatcttccgtttgcaaaaaaactgttgtctggagattatggttttctctgccagtatgacagaagtacaggtaaagatactgtctggtcagtcatctatgatatgaaacgacacaaaatttatcgtagtgaggggaatcccagacgacacaaattcaaagaagatactcgttttcaattttaatttttcaaactgatatattaccacaactaaatacccgccgcccacacagcggcacaccaagcaggaaatctgaaaaggtctcctgctttttttctgctcaaaatgaggtggtaaagcgccaccccatccaccaattaccgaaaggaggtacacgaaatgccctgtccacacaacgaaatcacgattgtacagcgcagccagcggcagtctgcggttgccgccgctgcttaccaaagcggcgaaaagttgttctgtgaatacgaccagcaagtgaagcactacccggaaaagcgtggtatcgtccacaatgaaatcctgctcccgcccaatgctccacaggaatatgcagaccgcaataccttatggaacgccgccgaagcggtggaaaagcaatggaactcccagcttgcaaggcggtgggtgcttaccatccccagagagataccacccgaccagtacgctgtccttgtccgggagttttgccagcagcagtttgtttccaaaggcatgatcgttgactttgccatccatgacccccatcctccgggacacaatccccatgctcatgtcctgctcactatgagggcaatggacgaacatgggaaatggcttcccaagagccgcaaggtttatgaccttgacgagaacggggaacggatcaagctgccatccggcaggtggaaaagccacaaggaggatacggttgactggaacgaccagaagtattgtgaaatctggcggcatgaatgggaagtcatccagaaccgctatctggaagccaatgaccgcccggagcgtgtggacttgcgctcctatgccagacaggggcttgatattgtccccactgtccatgagggggctgctgtctggcagatggaaaagcgtggtatccagacgaatatcggcaacctgaaccgggaaatcagagccgctaaccgcctgatgaagtccatccggcagctcatccaaaacctcaaaggctggattaccgagctgggcgaaaaaaggaaagagctgcttgcacaaaaggcagcggaggaagcgacatttcttcccaatctgctgatgaagtatctggagatacgcaaggcagaacgaagcgactggacgagggcgggacagaaccgggggacttcacaggacttaaaggcaatcagcgaagccctgtcctatctccggcaaaaggggctttccactgtggaggacttagaagcatttctggaagcgtccggaaaatcagccgcagattaccgcaatcagatgaagccaaaggaagcccgaagcaaagtgattgatgggattcttgccagccggacagactgcaaggaatgtaagcccgtctacgagaagtaccagaagatattttttaagaaaacaaaggagaaattcaaacaggaacacccggaggttgcccggtatgagaaagccgctgcctaccttgccaagcacccggatgataaggacagtacccaaaaggagctgcaacaggagcaggaaacgcttctggaagaaatcgcagccctgaaaacaccgttgaccgaggtacaggacgatttgaagaaactgcgggacatccgctactgggtacggaaagccacacccggcacagaggaaagcaaagagccgcccaagaaacagcctatcaaagaggtcttgcaggataaggcggacgagaaaaaagcacaaagaaccgccccggcacagacgaaacacaaacaacaggatatggaactttaacaggcacttgccattttcagattgagaatgtcaggtgcttttcttatttgcacgaatgacgagctggacggatacgcttgcatatccattcagcgaccaccgtgacagcgtgggaagctttcccacgaatcaaggagggatagatttgaatgtatttgaagctgtgaagcagtccgtcacaacgagacaggctgcggagcattatggaatccatgtaggtcggaacgggatggcttgctgcccgttccataacgataagaccccaagcatgaagctggatcggcgttaccactgcttcggctgcggtgctgatggggacgtgattgattttgccgccgccctatatgggctgagaaagaaagaagccgccgtacaactggcacaggacttcgggctttcctatgaggactggaaaccgccgggaaaggcaaaaaagcccaagctccggcagaaatctccggaagaacagtttcaggaagcaaagagccgctgcttccgtattcttgccgactatctccacctgcttatggcatggagaaaagattatgccccgcactccccggaggaagcctttcatctccggtttgtggaagccttacagaagaaagaccaagtggaatatttgctggatgtgctgctgtttggggagacagaggaaaaagcggctttgattacggactacggaaaggatgtgatacagcttgaacagcgaatggcagagcttgcagccgcagatgcagcaaggactaaaaaacaccatgaatgccatgcagccgccccagagcattgaggaaatcaaggcggggctggaaaccaccgagaaaggcggtgtccgccagagcatacggaactgcctgaccgtattccagcgtgacccgctgctttccggggctatcgcatacaacatcctgaccgaccgcaaggacatcataaagcccatcggcttccacagagaaagcacagccctgaacgatacggacatgaagtatctgcttctctatctggaagaaacctacgggcttaccaatgagaaaagattgataatgccatcgggattgtggcgaatgaaaacaagtaccatcccatccgggactatttaagtgcccttgtgtgggacgggacagaacgaatccgcttctgcctgcggcattttctgggggctgacgcagacgattacacctatgaagcgttgaagctgttcctactgggtgcaatctcacgagcctttcagccggggtgcaagtttgaaatcatgctctgtctggtcggcggtcagggggctggcaagtccaccttcttccgtctgctggcagtccgggacgagtggttctccgatgatttgcggaagctggatgatgacaatgtgtaccgcaagctgcaaggtcactggattattgaaatgtcggaaatgatggcaaccgccaacgccaagagcattgaggaaatcaagtcatttttaagccggcagaaagaggtttataagataccctatgagacccacccggcagaccgcccccgtcagtgcgtgtttggcggcacttccaatgcccttgacttcctgccccttgaccgttccggcaaccgccgctttatcccggtcatggtgtacccggagcaagccgaggttcacattttggaggacgaagccgcttccagagcttatattgagcagatgtgggcggaagcgatggagatttataaaagcggcaggttcaagctggctttcagccccgccatgcagcagtatctcaaagaacatcagcgggattttatgccggaggacaccaaagccgggatgatacaggcgtatcttgataagtacaccgggagcatggtctgctccaagcagctctacaaggaagccttaaaccatgcctttgacgagccgaagcaatgggaaatccgggaaatcaacgagatcatgaaccagtgcatttccggctggcggtactttccaaatccaaggatgttttccgaatatggcagacaaaagggctgggagcgtgaaaccccggcaacggactccggcaacccgtctgaaaaaacgatggatggttttgtggaggtcacagaacagatggagcttccattctgaaaatgacagcccgttgcaccccctgttgctatcccgttgccgagccggttgccggggaattccccttatttccgggcttttctcccctatgacaaccaaaacaacagaaaaataaaagaaaagtataaatagtaaccatcgccagattgagattgtttgcaaggtcttttgaagcccgttgccggacttcgttgccgacaccctctgtctggctattttcatgtatggaggataactgcctatggcaaaaaacaaaacagagattcatgtgaccactgtatttgacggggagctggacgccaccgatgtgttcgtcagcctgatttcccagaaatacggcaagacaaatacgaaagaatatcttgctaaaaagaaagatatgaagtataatgaaaatgaggttcaaaagagccagataccgtctggattgtgtgggtaaatggctatgatgaacgaaatggaatacagaacaatcggttcggcacttgccggagggtatcgtgctgcggtctattgcagactgtcaaaggacgatgacctgcaaggcgaaagtgccagtatcgcaaaccagcgtgatatgctggaaaaatactgcgaaaggcagggatgggaggttgttgcagtctatcaggacgatggcttcacaggtcttaatatggagcgtcctgatttacagagaatgttgagagccattgagcgcaggcaaatcaaccttgtcatcacgaaagacctcagccgactggggcgtaactatctgcaaaccgggcatttgattgaggactttttcccaagaaacggagtccgctatatcgccatgaatgacggtatcgacaccctgcgggataacaatgacattgctccgttcaagaatatcctgaacgagatgtacagcaaggatatttccaagaaagtccattcctcttatcttctgaaagcgcagaaaggacagtttaccgggtgtcttgccccgtttgggtatcggaaagacccggaggacaaaaaccatctgctcattgacgaggaaaccgccccgattgtgcggctgattttcggatatgccctaaacggtcatggtccgaactatatccgcagacggctggaggaagaaaaaatcccctgccccacatggtggaaccgggaacgggggcttcgcaatacccgcaccaaatgggaaaagaaagacccggaaaacgggcggtatatgtgggatttctccgttatcaaagaccttttgatgaatcccgtctacaccggggcgattgcttcccagaaaaaggactaccgtttcaaaatcggcacgattggggaaaagaagccggaggactggattgtggtggagggacagcatgaaccgctgattgaccgcatgagctttgacattgtgcagaacaagctgaaatcccgccagcgtccggggcagaccaatgaaatcagcctgtttgccggactgataaaatgcggcgagtgtgggaagtcgctgacgatacgctacacaaacgcaaaacatccccagcgggtttactcctgcaagacctacaatgcctttggaaagaaccactgcacccagcaccggattgattatgacaccctttacagccatgtgctgcggaaaatccgggaatgtgccagagctgccctgatggacggggaagcggttgccgaccgcctgaccaatacctgtgaagccgagcagcgggaacagcgtgaagcaatggagcgctcccttgcaagggacgaggaacggattgaggttctggacaaactggtcgtgcggctttatgaggacatggttgcagggcgtatcagtgagcagaatttcaacaccatgctggaaaagacacagaccgagcagaaggagcttaaaaccagagtgtccgagggcagaaagcggctgtccgatgaagtccagcttgccaatgacgcaaaacaatgggtggaagccattcaggaatatgccaatatcacagagctggacgcagccaccctcaaccgcttaatcaaagaaatcgtcgtgcatgaacgcattgacgaagataaaacaagacacatttctatcgaaattcattttaatctcaaacccatcccggaggtggaacaggtcactgcctgacctgtcccgccgggacggttctcttaaaaacaccatatagatttttgtacgccgccgcccgccatcgagcagagttttacacctaattggggataaaacacttcacctacatacaaagcaattacttatcttcaatctccataatcatgtctaccctcgtctgatggcgtccgccctcaaactctgcatccagccatgccttcacaatatccttcgccagttccatccctacgatgcgggctccaaacgccaggatattcgtattattgtgctgtctggagagccttgccgttgccggctcggaacatacagccgcacggatgcccttcaccttgttggccgccagagagattcccactccggttccgcagatcaggatgcccagatctacttccttcgacgccactgccctggcaaccgcctcaccgtattccggatagttgcagctttccttcttatccgtaccgtaatttacaacttcatagcccagttccttcagataatctgctatctcaaacttcatctccaccgcggcatggtcattaccgattcctatcttcattgctgtaccctctcttccatttgttatctttttatattataatgtgaaagtgttaaattagcaacacgccaacatctaatttgaaggagaatctatatgatcaaattaatcgcaagcgatctggacggtaccctgcttaagaacggggcccaggaacttcccccggaagtctgcggtctgattctaaagttaaaggaaaagggcatccattttgccgccgcgagcggaaggcagcttcacagcattaagaatctctttgctcccgtcagggatcagatctcttatatcaccgagaatgggtccttatgcatatccgaagacggaaccgtcctttcaaaaggattgatccaaagagaactgggacttgagattttccaggctgcgaaagaatatggcgactgccattgtctcctgtcctgcgagtccaaatgctacacggattctgccgacaaggcatttcttgattatctgatcaatgatatgcacaacgatatgggaatcgtcgatgatctaagcagtataacggagccctttttgaaggttgccgtctgtgacttcgagggcaccaagaatcttatgccttacttcaaggaacggtttgacggggagatcaaggtggtcacttccggcaatctttgggtagactttatcgctcctaacgccaacaaaggcactgccttaaaagatctggcagagcacatgcatatcaagccggaggaaatcattgctttcggcgaccagtataacgacaccgagatgcttcagtttgcaggcatcagttatgctatgtccgggggcgcgccgggcatctcctactactctacctatgtgacggactctgtggaagaggtactggttgatctggctgcctcggtataaatggctaccggggccaccgcttctcttttggaggcagttcccgcaacttgttatgaggctcttcctgataccagtagggctcctcataaaattatggattcactttatatttacagtctcctgttgtcagcacgtcaaccacgttctgcgctgccatcaggctcatcttgctgctggcttctttcgttgccgctcctgcgtggggcgtaagaatgcagttcggaagcgtcataaggggactgtcatatggcggctcatctaccgtcgcatccagtcccgctccccggatgctgccggacttcagcgcttcgtacaatgcctcttcattgatgatcccgccccgggccgtattgacgatcaccgcgtcattcttcatcatgtcaaattccctggcgccgatcatatcttttgtctccggcgtcagtggagaatggatggttatgaaatcggattccttaagcaaggtagaaagatccacgtacttggcattgcattctttcttaaatgcttcattctcgtagatatcataacagagaatcttcatatcgaatcccttgcaccttctggccaccccttggccaatccttccggttccgatcacgcccaaggtcttctgccacatctcgactccctgggggcgcgcctgggctctgcccttcatagccgcgtccatagccgccacattgcgggccgcgtccagcatcaaagtcaccgccaggtctgccacagagtctccgttggctcccggtgtaatggtaaccaggatccctttcctgtctgccgcctctacatctaccttgtcatatcctaccccgtaacgggagatgaccttcagtttcccggccaagtcgatcaattccttggaatactcatccagtcccgcgatcaccgcatctgccgccgcgatttcttcttttatctgctcgtcaaatgtggcaactcctgccacaagcctcacgacatcgcagtcatgttcctctaaaagcctcaacgcctgatcgtccgcctttgcgaacgaccttgctgttacaattactttatacttgcccatattcttcctccgctattacttgcctattgtctgccaatctgtatggaagtgcccttccttatccttccgcatatacgtgtgggcgccgaaacagtcccgcagcgcctggacgaatctgacgggcatatccttcatacggtaataatcataataatgaagcgcggccgcaagccctgtcggagccaatcctgcggcttccgccttcaccactacatttcgaagcgatggctccagcttccgcaggctttcaaatgcctcagataagatcagaggcgcggccgtttccattgccgcttctttgatatctcccagcaggctgcttcggatgatgcaccctgccttccaaagatctgcgagggtggccagattgatttcccagccattgtcatcggatgccttgcgtatcaattccatcccctggctatatgacagcgctatggcgagaagaagcgcgtctcctaacgtctcttctgcttgattaagttccatcttcctggctgacgcattcaggatagccgcgccggcaaggcgctcttccttctttgccgaaaaactgcgcgcgaggacggactcatagatgcccggcgtatatacgcctctttctatggcctcgcaaagcgtccacttcccggtgcctttctgttccgctacatccaggatcctgtcaattagcggcacgccgtcctcttcgtattgttccatcacctgaacgctgatgtcgatcaggtaagactccagccgcgtccgctgccagcctttgaatactgcaaggacatcttcgtgggtcatggaaagcccgcttcgcataagcatgtaggcctccgcaatcagttccaggatggagtactcgattccgttatgtaccatcttcacataatggccgcttcccccctggccgacataggcgcagcaaggctttccatcggcctttgccgcgattgccgtcagaatcttctctcctgcccggtagccttcataacttccaccgggcataatgctggggccgtacaatgcgccaagccttcctcctgatatgccgcatcccacatagcgaatccccttctcttccaaggcgtggcaccgtatgtccgtgtccttataataggaattgcctccatcaaagatcacatccccaggctcaagcgccggaaccagcgaagagagcacggcatccaccgggcctccggcggtgatcatcagaaatatctttcttggccgggcaagggactgaatcagttcctcctccgtcccgcataccttgcatgtttccacataaccgtccgtctcgaacctcttgcgctcttcttgggacacgctgtataccgcggttttgaatccatgaaccaacatatttttcgctatgccagcccccatgacgcccagcccatatacgcctatctcacactgcattatcctcttctccttatctgaccaggtatccgccgtctacaggaatgatggcgccattcaaataatcggatgcctcagaagccaggaatacgcatggtcctttcatatcatccccggttccccatttcttagcgggaattcgctctgtaatcgcttggtatcttgggttggcaggatccatcagcgccgtattcatctcggtcgccatatatcccggcgccagggcattgacgttgatccctttttccgcccactcgttgcagaatgctttcgtcagctgagccacagcgcccttggaagccgcataggcaggcactgtatagccgccgaagaaggacagcatggacgcgatattgatgatctttcccttgctgttctgtgccatgaactgcttagctgccagctggcacatgtagaatactgcgttcaggttcacgttcattacaaagtcccagtcctccttggggaattcctcgctcttgtgcctgcgctgcacgcccgctccgtttaccaggatatccaggcggcctcccagcatttctacagcctgactgaattttaccttcctgtcctcttcctctgtgagattggcaatcaccgcgtggcaggcatagccctgggcgcatttctcctttgcgacttcttccgccttcggattgacgtcgatgatgcagaccttagttcctgcctccatcagcccttctgccatgccaaggcttaagccctgggccgcccctgtaacgattgccttcttgcctgtcagatccgtataattcttcataattgttcttcctcttttctgcttattttacaagttttactgcctcttcggttaattccctgatcttgtcaaattccccggcattgatgtaggcgtcttttaccatccagctgcctccgcatgccacaatcttgtcaaatccaagatactccttaatattgtccgcattgattcctccggtaggcataaagcgcatggacgggaacggcgccgcaagcgctttgatcgtgccaaggcctccataccgcttcgccgggaagaacttcaccaccggaagctggtattccatggccatcatgacttccgtcggggtgcaggtaccgggaaataccgcaatgcctttctccagggcgtattcgaccaccgtcctgctcattccgggagagactatgaactgagctcccgcctccactgcgcgcgcagcctggtcaagattcgtaaccgtccctgcccctaccagcatctccgggaattccttcctcataatccggatggattcctcggcggcgtccgtcctgaacgtaacttccgctaccggtagccctccggcacacagcgcctcagccagcggcctggcatcctctgcccggtccagcttcacaacaggtacgatctttaattcctctacttttttcattacatccatgttcattctctccttcttactctgttactctataagttacataaacgcattcggtatcagcattgatatcgccggtataaacgtgatcagcatcaggcagatcagcatgactaccatgaatctcataatgccgctggtaaccgtctcaagcggctcccgcccgactctggccgccacgaacaggttgattcccagaggcggcgtgatgaatccgatcgcaaggttcacaaccatgatgactccgaagtggatcgggctcattccgatgctaagcgcgatcggaagcaggattggcgacagtaccatcatcgccggcgtggtatccatgaagcagcccacaatcagaagcagcaggttgatcagcagcaggatcagcacatagttggtggtcagtccgctgattccctttgtgatcatgtccggaatccgctggatggtcagaatcttcgtaaatgccgtggcacatccgataattaccatggtcgttccggtggtagagcaggatgcggcgatcggatcaaagatattcttaatattcagttccctatggatgaatgtgccgcatataaacgcgtataccgccgcaactgccgctgcctccgtgggcgtgaagattcctgcatagattcctcccaggatgatgaccggattgatcagcgcccatttggcatcccagactgccgccagtttctccttgaccgtatagcggcggtcatctcccttccatccttgcttcttgcagtaaaagtagcagcagatgatcaggccgattcctatcaggatgcccggcaggaagcctgccataaacatgccgctgatagacgtgctggtagacacgccgtagatgaccatcggaatactgggcggtattacgacgccaatgcttcccgccgttgcaatcagcgccagcgtgaaactcttgctgtatcctttttcaagcatcgtcggcactaccatggagcctaccgcggctacggttgccggcccggagccggacaccgccgcaaagaacatgcatacgatcacggttacgatggcaaggccgcccgtgatccttccaaagaacacattgcagacattcaatattctcttagatactcctccggcgctcatcagctcgcctgccagaataaacagaggaattgccatcagcggaaatgaatctgcgctggtcaccaactgctgcacgatataggtggaacttaatcttccgtctgccagcaccgctgccagggaagatactccgatggcaattcccacagggacattcaccaccagcgcaatgattaacacgataaaaagtactgcacataccatccttactcaccatcctttcctaattgcccgaccctgtagaatatggtctgtatctgcctgatcgccgccaggaagaatcctgccaccggtgccgcgttcacaaactgaagcggcagtccaagcgcgggcgacgtctttccaagctgcgcctggaacatggtcagctcccatccggtgatcacgatatacacggcaaatgccagcacgcacagatccccgaatatcactacatatggccgcatcttttccggaaacagttttaaggcggcatcaattttgatgtgcttcataatcttgcatccatagctgatcccaagatagatcagccagataaagcagtatcttgcaaattcttccgaccaggtcagagaattatggaaaacatatcgcattacaacctgcacgaatattacaaccgtcatgactgacatcaatgccacgcacagagaaatctccaggtattcatccagccagtgaattaattttttcattctgcgttccccctatattcttctaattctgtctgcatctcatcaaagtactctggatgagtcatcttgcttttcgcgaaatcaaatatctcattttcttctacgatcttctggaaagcctgcttctcctcatccgacagcgtaatgatctcgcagccgtattcttccatatcctttagcgctttctcctcgtcttcctgagagagcttgatctgatactcggtggcttctttcatcgctttatccaccgcctttttctgctggtctgtcagggaatcatatttccttgggttcatgaccacgcagtacggagtatatacatgctgcgtcagggagatatatttctgtacttcgtagaaccggttgctctggataataccgatcgggttctcttctccgtctacggttccctgctgcattgctgtaaacagttcagagaaggccatgggcgtcggattggctccgatcgcggaccatgccttcagatggatgtcattttccatggtgcggatcttctgcccttttacatcttctggcttgcttacgggaatcttgtcattggtataattgcggaatccattctcccacattgccattccgcgcagtcctacgtcttccacgccttccatgatcttctctcctgcctctcctccaaagccgatatcatagacttcgtcggaattcaggaacaggtatggcgtatcaaacaggtaataatccttatacattgtagaaagcgaactggtcgatgacactgcaatatcaatgtcgcctacctgcactccttccaccgaggtcttgtcatcccccaactggttatcctggaatacatccacggttaccgttccgtcggaatattcctctaccaactctttaaacttcagtcccgcctcttttgcggaagaggatgtaacattggacaggataagattgaccttttcttcctgcttgaattttcccccaaccgcagtgaacgtcgcgcccaatactattgcagccacaaccgccgccgaggcgatgatttttttcttctccattttcttcctcctattcttgctccatgcttgtatacatctgcaaatacctctcaaactgcttcctataccgttcattccttgccatatccggcctcacggcagcctttacgctcggctcatagtcggaaatatccttaagatcccctatgatttcccgtgccagtatgaccgcgcccatcagggaactttgcttggattgatctatctccatctcttttccaaagatatcggcgcacatctgcgtccataccctggaatggagaatcccccctgatagttttatcttctcaggctcccctgccacttccgtaagaagcctgtagcaatgatagagattaaataagattccctgctgtacgcccctgtacatatccttaatgtcatggccggccttaagtccggcaaatccgccgcctcttttgtcattccatccgggacatcgctccccaaagaggaacggaaggaatatgggcgtatccagaatctcgtcttccccttgctccagctggctatagtccgtcttgccagccgccacgtgttccacaaaccagtcaatacagttgcagcaccctgccgttgcggccccgctaagccagcccttaggcgacaggtagcaccaggtggatggcgatttgggaatcatcggcttggcggtactgatccgcatggctccgctggttcccacggagaaggtcatcacattttccttaatcgcgccaacgccgatctggttcaggcctccgtcagaattggccacaatcaccggaatccccgggcgtagccccagaatcctcgctccttcttcggataatggctgcgtatgattgctttctgtaagccgggacagctggcttctggcgattcccgccatcttaagaatctcatcatcgtattccctggtatgtatattcataagccctgtcccggatatcatgcatcgggaggccacccgctctccggtcagccggtaggtgttataggttccctgccccatgatatagtagtctttcagatcgtatccttgctccctgagagaaagaagcttgaaaaatggataggtggcattcaccatgcagcctgtcttctggtaatagtcttctacaaaaccggcatcttccctaagccggccgcaaagcggggccgcaccggtataggaccagggatagacaggtgttgccggccgcatcctacggtcgcagagcaggacgctgtgccatgtcccgcttaatgaaataatggaaatctccctgcccccggccagcgctcttccaatcttcgccatgcagtcaaacaccttgtctgcatcgtgaagcacttcctcatcatacattttcccatatgcttttatcttctcttcatacgttctgctctccgtgtcgtagagcatggctttcgccgatgtcgtacttgcctccagggctaatatccgcataacattgtcttccttccgtctttctatctgtcctggcagtccacgatcaccttgatcgtgccgcacgcttcatccgcgatcatgtcgaataccttctcgctgtcttttagcggaaccacatgggttactacctgttccagctgttcttccagaagcccggatagttccaccgcctccttgaattcttctctggtgtagaccctggttcctacaatatgctgctccttgaagttcacatcccgaagtatgacctcatgaggcgccttatgtaccgatacgatgcagatattaccgcttacccttgtaatatccgtcatctgcatggcagctgcggccgcgccgctgcattcgaacagggtatcgcatccttccccgtccgtggcgtcttttacgacttgttccaggtcttccttgaccgggttcaccggaatcaggccgaacgcccttgcctgatccagtctttttgcagccacatccgagataaataccttggaagcgcctgcaaacttcagcacgattcccgtcagcatgccgatgggacccgctccgatcacgacgcaggtgtccatcgtcttgaagccggattggtggatcgctcttacgatcaccgctaaaggctcgatgactgtcgccgccttatcgcttatcccgtctggaaccttgtacagcacgttctcatccacatagatccgttcgcacacgccgccgtccttatcaatgccgatcagtcccagggtattgcatacatgctcgttccctgtcctgcaggctctgcattgtccgcaggatagcagcggaaacggtactacccggtcgcctttcttgaacttctgtccgtcttctgccacaatccccagaaactcatgcccgaaaaccagcggcgccttggctctgggatgcgtcccaagatagattccaatgtcagatccgcatattccacagtactttatatccagttttaccgtgccttccctcttcttcggctcttccacttcctctagcacggcctttttggcgccttcatacactaatgctttcataattccctccgtaatctttagatttttttctttctaaaaaagattttttctgtatgtaattatatattttattgccaatcgcgtcaatctaccaattttcctataattagacaagaaaatttgtgcaatattacaataactctatcaaacagcagcaaaaaaacggcggaaaacgcaatttgcttcttgcgttttccgccggttttgtaatttgctattacagcatcttatcaatcttaataatcatgctgatcgcctttaccgcattattaatatgctctttcaggcattccctgagccgctcttcatcctcgtcaaagattgcctggataatcttcctgtgttcttctactcctgcaaaatctttctccttagactgtttccggaaaatataattgctgtatatgaaaggattcacgctatggtataattctaccagtttcctgttccccgagcatttcaggtacaattcatggaatttggcatcatggatataattctccatatatttttctaccgtattctcattctcatacttcttcatgatctcataatgctcattcacattattctcaagcgcttccctgagcgtattgttcgtatgtacggcctcaatgatctccttggtataataaagatccatcatcagcctcaggctgaatatctccttagcctcttcctcgtctatcgactttatcttcattccatggcgggggaaattctccacgatctgctcggacagaagccggtttaaggctatctttaccggcgtctcgctggtcccatacctggccgccagtgcttttacattgatcttctgtcctggccttaactcatgggcaataatatccctgcgtatatttcggcatatggtatcaaccatggtttcttttgtctcttgctctttcgacttcttctcgctcataacactcctccagatcttatgcctcttccctgtcattcgttaattttaatttgtcaaggatatagaataccaggctcagcgccattcctaccacacaggccagcaccatgcctgtcagctgaatatttccaaactttaccgagattccagacagtccggttacaaataccacacttgtcagcgtcaggttcctggaacgtccataatccaccttggaatccaccaggatacggatgccggatgcgccaatcataccgtacaggagaaaggatatgcccccgatgacgggtcccgggatcgtctggatcaaagtggaaagcttccctacgaaggaacagataatggaaaggacggcagcgcctgcgatcacccttacgctatataccttggtgacagccatcacgccaatgttctctccataagtcgtggtcggtacggagccgatgcatccggatagcatggtagaaaggttgtcccccagtaaagaccggtgaagccccgggttcttcaaaagatcacgccctacaatcttgcttgttactacctggtgtccaatgtgttccgatgtaatcaccagcagtaccggaaggatgatcaggatggcctccatgctgaacttcggcatctgaaaattcggcatggcaaagatggacgcctttgacacttccgtaaaatcaacgatgccgcagcaaagcgcagccatataccctgcgatcaccgcaatcaatatcggtaccacagaaagaaagcctcggaaaaggatgtttccgaagatcgccactcctagcgtcaccacgaatacgatcacgttcttggggtctaccgtcttctccagcagtcccgcattgccggctgcgctccccgacagttccagcccgatcagcgcaaccaccggtcccatagcggccggaggcagcaccacatcaatccagtctgacccgaatttatagatgatcagcgcaagaacgcagccgcagaatcccacagcgacgaatcctcccagcgcatacggataccccatctcgctgataacgattcccgccggcgcaagaaaggcaaaactggaacccagataagccggcgcccttcccttggtgattaagataaacagcaatgtccccacgccattcatgaacagcacgatggcagggctgattccaaacagaaacggcaccagcacggatgccccaaacatggcaaacatatgctggatgcttaacggaaccagcagccggaaaggaaccttgtcctctatctggatgatttttcgactttccattttatttcctcctcttgttcttcactctcaaaacctacattcttttatattttatcataaggaagtggggaatggaattaggaatttggggggaattgagggaattggcaaaccgcccgaggggagggggcgtggatttctccgaggcattggcgcctccatctccaaaattctcttaatataattccttcaccgtaggatatatcctccggaacttctgatacctttcctcgtattttgccaccagttccgaatctggttctaccgtatctactacttttaccagttttttggcgatcgtctccacatccgggtaggctttgcagcccactgccgccagcatggccgcgccaagcgccggtccttcctcgctctcgatcacatctacgttcatgttcatcacatttgcgatgatcttcttccacagcgggcttttggctccgcctccgcagatcttcgtgcgctcgatctggatgccaatgcttcttgccacttccagggaatcccgaaggccgaatgtgacgccttccagcacggcctgggtcatgtcctcccttgtggtatccatggacattccgatgaacatggcgcgggcatccgggttattatgcggggaacgctcacccatcaggtacggaagataaaatacatgattctcgccaagcctggtaataccggactgctccgcggcaaagtccttggactttaatatctcctcgctccaccatttgttgcaggcggccgcgctcagcatacagcccatcagatgataattgccgtccgcgtgggcaaaggaatgcagggcgttatgctcatccacgccgaacttcttgctggaaatgaagatggttcccgaggttccaagggaaatattgcatcttccctctcctaccgttccggttccgactgcagccgccgcattgtcccccgcgcctgcgattacttttaccgactttggcagccccaattcttcggcaatcccgggccttagcgtgcccaccacttcgtagctttcatgcagcgcaggcagctgcgcttttgtaatgccgcagatatccagcatttcctctgaccagcatctgttctttacatccatcagcagcatccctgacgcgtcagatacatccgtgcagaaagagccggacagtttgtaggccagataatccttgggaagcatgattttgctgattttcccaaaattctccggctcatgcttcttcatccagagaatcttcggcgcggtaaatcccgcaaatgcgatgttcgccgtataagcggacaatctttccttgccgatcacccgattcaggtaatccgtctcttctcctgtccgtccgtcattccacagtatggccgggcggataacattgtcatccttatccagcgccaccagcccatgcatctgtccgccgaagctgatgcctgcgacttcttctttgtcacactcctcggtcagttcccggatgccttccatggactgttcgaaccagtcctgcggcctctgctccgaccagcccgggtgcggaaagaacaggggatattctttggaaacgatattgcgtattttgccttcttcatccatcagcagcagttttaccgctgaagttcccagatctactcctatatatagcatcttttttcctcctagtattccattttaactctgttcctactcataatcttgcacatacgactttctatgcctttccttccgtcttatcgccagggattttccgtcggatatctgacgccggcaggctgattatagccaatctcttccaccggcacgccgatatacttgaacacctcgaacaaggtctttccgtggtggccgaacgcaacagcgccatggtgcggatatccgccttcgatcaatacatggcggtaaaaccttcccatctcgggaatcgcaaatactccaatgccgccaaaggagcgggttgcgacaggcagcacctctccgtgggcgatgtaggccctcagacggctatccgcggtactttgcagccggaagaaggtaatgtctcccggaatgatatctccttccagagttccctgcgtcacctcctggggaagcgcccttgccatgatcttctgatacttcatctcacagaatgccagtttggacgaggccgtattgccgcagtggaatcccatgaacgtatcctgtctggtataatcgaatctgcccttgatatcctcttcaaacatatcttccggcacggaattgttgatgtcaagcagggttaccgtatcgctgctcactacagttccgatgaattcgctcagcgccccgtagatatccacctcgcaggataccggaatgccctgggcagtcaggcggctgttcacataacaaggcacgaagccaaactgggtctgaaacgctggccagcacttgccagcgatcgctacgtatttgcggtatcccttatgttcttccacccagtctttcagcgtcagctcgtactgtgccagtttcgcaagaatctccggcttcttattgccctctcccagttcctcttccatctccctgacaacgccgggaatccgctcatccccgtcatgcttatgaaaggcctcgaacagatccagttccgaattctcctcgatctccacccccaggttatacagctgcttgatgggggcattgcaggcaaggaaattcagaggccttggcccgaagctgatgatcttcagattgctcaatcctatgatagcccgggcaatgggcagaaattcatgaatcatatccgcgcattctcctgcgtcccccaccggatattccggtatgtaagcctttatgttccgcagtttcaggttatagctggcattgagcattccgcaataggcatctccgcggccatccagcaagctgccgcccgtctcctccgctgccgccaggaacatctttggcccgtcaaaatgctttgcaagcagggtctccgctatctccggcccgaagttgccaagataaaccgccaatgcattgcacccggctttccgtatgtcctccagtgcctgcaccatatggatctcgctctctacaatacagatcggacattcatagattccttcctccccgtatttctcttgataggccttcatcagattctctcttctcgtcacggacagactctccgggaagcagtcgcggctgacagccaccactgcgatcttcacttctggcatgttactcataatcattgtacctccttctcctatttcgtcaagtaattatagtgtaatattttctccttttaacccgcagaaagcaccttcgatcgcggcctccttatgggcgatcagccatttgttcctggccgccagaagccgatcctctccatcctttccaggcttaaagtccaggtctgtattggtttctttcggcagtacgatgacgcatctaaacccatctccctgtgctgtacaaggcgcatagtgaagcgtcgtcgcatatagttccaccgccgtcccggccttaacataatatgcctctgccctttccgtatcataggtgtaatccgcctctatatcctgctgccgtcccagaagcagaatcagatcgctggccgcaatgtctatctccgaggaacgatggtactccagcgcattcagcttattattattgccattgcaatagccgatctggatgggcaggcctccatatgcccgttctttcagtttcgccgccacaggcagtccttccagttcctccacggacgccacatagatgacgccgtcatccggtaccggcgtgtgtcccatctctttcagcagccggtcaaagccataacctttaagcacctttccgtatacgccaaaagacggatctgttaccttgcgaatctccatattttcttcctccttttgccttcgtttattataaggtcattatatcaacttattttttctgtcacgaccaattattcaccctgtttatggcaaattcttgtctttttattcaaaaggggacagggcagatgccaagtggtgacgtaacacttttgaaaaatgttacgtcaccacttgagtctctgcctggcgctttctatattcgcttggcagcatgccatattttcttttgaataccttcgcaaaagccttgctgttggcaaatccgttattactggcgatctcgccaatcgcatccgatgtgttcaccagatccttgtatgcatattccagcctgatatgatccagataggttttataattggtcctggcatacttctgaaacatcctggacagataggtgggcgaatagccgaagatcttcgccaggctctccagggataagtctttggtatagtgatcctccatgtatgccgtgatagcggagagcttattcaacttcttattctggcgcaccagatccatgctgacctccatctcacggtatttggtcaccagaagatacaccagcaggtagaactggcccagaactttcaattcatagccgcagtcccggcgggcatatgtttcatacatatcttcgatgaggcgcatcacttcctcgtcctgaagtctggaactatgggagaaatagatgaaacgttcctccgtatagtaattttcgaacgtgacaagcggtatctgaagcacaatggtccggttggcctttggggattggatggaatgaatctcattggaattgaccagcatgaattccccgggcttaagcgggtattccttctcattcaggaagaatcttaattctccctcgaacagcgcaaatatctctaccgaccgatgccagtgcttctctctgacgtagttgccgtccttgccttcgaatacgaacatcttaaatggaatgtcgtcattgggcatgatgaactcatgtgaatactccatgtctgcttatcctccattttcacagggtttatctgaagcgccagcctgtatccacccggtcgctcccaatacctggaccgccctggccccgcatgcatttgcgtattcggcgcattcccgcagcgtcctgcctttcgataatgcgtagataaaccctgcggcaaaactgtctccggccccggtggtatcgatgcatctaacccccggctttgccaacactctgtagcattcccttctgttccttaccaggcatcctctggccccgcatttgatgacgacattcttcacgcctgcctcaagcaggcgctctgccgcttcttcggccgtgtccttcccggtcaccaggcatgcctcctcctcatttggcagaatgtaatctacacattccagcgcctctttgatatcctccaccgtctcgccaagtttcctcttggtcatatccgcgcacaccgtcatcccctggctctttgcctgggcaaatatcttcttaaggcccctgcagtcaatctcaggaaacacaaagatgctggcaaagctaagaatctttgccccttccgggaatggcatcctgacatcttctattttaagccttctgaggcttccattggcattggtgaggaaactgcgttcaccgtcttccttgatcaggaccacgttgattcccgtaggcatctcagggcgtatctgccggggctctaccgcgatcccctcttctatgcacatctcccggatcatccggcctgcatggtcatccccaagtaccgtctccagacggacctttttccccattctggccaagatcacagcctcgttcaatgcgtctcccccggtagacatgcatatatcctccatgggacttgagcccgtacgaaacactgcttcgtccgccggcctcgcaagcacgtccataattgccgctcctatcaccactatttcaggcatccctgtcccaactgctttcttgttctccatctggcatccctttccactcttcattatatcccgggtattccgctatactccctattagtgtactacgccgggccgataaccgcaattggaatatagccatgtcacttcgcctttccatagcactgggtaatggtcacggaactggtatcctcatctttaatttcagcttcggcatacgtccgtccatcgacaggatggaggatcggctggatcgccaggtcttccggaaccagtttccctcgccacgcttccaggtcctcttcctcctggtagaacctgatgcctgtattcccggttctcttcccggtgccggatggcatattcttaaccttcaaccctacgatcttataatcttctatctgtttccccacgtctgccccatgctcctttagaaaattacaggtccggccaaagaatggatagatggcggccctcatatctttagcgctgacttctgattccaattctatgtagccgaccggaagcgactccttcagttccgcaagtttcaggctatcaacatccgccttatacgcagccagaaagtcttttttctcctgggcggtcagccgaagcgtctgttcaagcactccgtccgaccagaccagtctttcctgttccgcctccttaatctcagtcagcgggtaggccttctctttgtattcaccgcactcatacacgccggcaaaggcatccaggctctcttcatccaccgggtaggtccggtatttcattgccccgcttttcatctcatagcatacggtagccgtcgtaactctgccggagccttttccctgtcggcaaaccgttcttagccaggcaagcccctcctccattccgttctcgtgcaaagaatactgcgcaagcctgctgtctatcagataatgatcccttcccgcttcaatctcttcatattgggcctggtcaatatccaccccattcatgaagatggaaagtccctttatctggtccggccgcgggtagaagccatcgaaggaatcccggccttcgagaaaggcaagcgccgccacgcatacggcaatgcattccgccgccaactgtcccttcctgcgtgctatctttcttagaggaacccttaccagcccctccaccagaaaatggactgccagcgtgccgacaactccggctagcgtcaggcacagcacgccctttaagcctccttcccccattatatggaagatcttcaggatcagggtacaggcgcataggcccgcaagcacagatagcaggaactctgtcacgcgttccgccagccggctcgcaaagccccttcctgtcatctccgtctttcttcttcccaataccagcagaattgctacacccagaagcaatatccatgcgagtgcggcgcatatttgccctacatttgggaagtactccagtacctcccgcttctcatacaggaacgttcctgccaaagtatccgcaagccttgcaggtaccagcaatctgccggcctcttccaagagcgggatgcggtaaaacgtatgaaagatctcttgggacattccaagcaggacgtactgagccagtatctcgaagtaaaacagcagaacagccagcaccgccaccgcaaaagccactctgcccgatacagcagccgccatcagccccatatggtagaacagcagaaagaccagaaaaaaaacgatcacgctgcgcacggtatacacactagcataaggagcgaacaaggtatcgcggcctgcctgatacacggcgcataccgcctgggtgataagaaacggaaaggcaaaatgcagcagcccatggaaataacgcgtccagaatatcgtgtttctctttaccggaagactatagtagaagtcctgcttcttcgcctggaacaggtagttgaattctgaaaacgccaataaaataccaagtcccatacacagataagaaagttccgcgcttccaattccaaaaaatgaaaagtccgtatctacagaaagcgacatgactttgaatatcagatacagcgcaaatcctccccaggcaagaatcgcgctgatatgcccccgccctgcttccttcagccaattactgtaatactttgcggatgtcataaccattttcctccatctctgccataaatatctcttccagcaacatcggcacctccctgcagaagatgggattcctctgccggatattctccagggcctcctctttctttcctctgacgatcaccgtagtaaagtagccgtcacgatggcagcgcacaatcgacggatgctccgccatcagcggctcatcctgctcgaacacgcactgaatcttagtcatcgttcctgccttctccctcatatccccggccagcaaaaggcctcctttgtgcaggattccaatctcattgcagaagtcctccagatcctgtaatttgtgggctgccaccacaacagtaagagcgcgctcatggatttcttttccaaacaggttcttcatcgcctccgtcaccaccggatccaatccgtcaaatacctcgtcgcacagcaggtagtctgtattggcgcataaggccataatcagaaacgcctgcctcttcattcccttggaaaatgtacggatcggccgccggatatccagttccagccgatccgccatataacgcacgccgtttcggtccatggcggaatactgcttcttatagaatctggccatatcctccatggtggctgtagggaagtagtaagggtcgtccggcagataaaagaatcgttcttttgccccgggattttcataagcgacctctccattgatcctgaccgtcccggcgtcagccttaagaattccagccattactctaagaagcgtgctttttccggccccattggttcccagcaggccaaatacttttccttcaggtattcggaaggagacttggctcaatgcagcagtgtcatcaaaatgcttgcttatgttctcaatctctatcatctgactcctcttttcgcataatacctttgttttatatgttacaattacttaataaattgtaacatatctgtaatatactggcaagttttcaagattgccgtacctctgcatacttctgccatcccgctgacgtccttcactcattccaagagaaagaccctcgggaaatttatttctattccccgggggtcttctttattcaatatctaattctggcggcacatccagttcgtgcggtacaggcctgccgttcttctttctctgtcttacacattccgtcaagagatattctatctgaccgttgacagaacggaagtcgtcctctgcccaggcggcgattgcatcgtagagtttggctgagagccgaagcggaacctgttttttccctttatctgccatatcaataaagtgttcctgaatttacgatcggctgtgcatcatgatttccacaaagcactaccagcagattggataccattgccgcctttctctcttcatccaattctaccacctgattctcattcagccgttccaaagccatctcaaccatccccactgcaccgtctacgatcattttcctggcatcaatgatagcagatgcctgctgtctctgcagcatggccgctgcaatctcaggcgcataagccagataggtaatacgtgcctcgacgatctcaagtcctgcctcttccacctttgtctggatctcttcccggattctggaagccaccacctcgctggagcctctcaggcttccgtcgtcagcaatcccatctcccgtggtgtccacgttgggagccacatcataaggatacagtcgcacgatgttcctcagagcgctgtcgcactggagggacagatattccttgtagttatccacattgaaagctgcctttgccgtgtcaactacccgccatgtcaccgcaataccaatctcaacggggttgccaagacagtcattgatcttctgccggttattattcaaagtcataatctttaaggagatcttcttatttccggattccgcgcctgcactctggccggattcctttctcttgcctccatctacatcgccgctctggctaagtcttgtcttggacgccgggttgacgcttgtgcagaatggattcacataatagaacccgttatctttcagcgtgccgatatatttgccgaacagcgtaagcaccagcgcctcctgcggccttaagaccttcaggcccaggaatgggatccagccgatacaaagccatatgcctgctataattcctactgccacatgctccccagccactccatagatcaggcctgctgttgccgctccatataggagaagaagtaccagaagcatagccatgccataccgtttgcccttaaaaaccttttctttcataattcataccgcccttctatcttttgatgttttaatgatatcattttgatatcagtttgtcaacagttacctgcgcatgaatgtaaattctttttagaattatacggaatatcctgaaaagccaaaaaggaccttccgatttttcggaaagtccttttgaattcaaataattcaatattattcgatgattgtagcatggtttttgcaagcactttttggagaaaaatgcaaaatatttttggagaatgttgcatctccaaattggagaaagttgcaaggcctcggctggcagctattctgccagctacatagccattgcagaccatatttagttgttatagcgtgagatatggaaacggaagttccgagttttcatcttcatgtgcatgttccctgaaatagcggaactcctcatccagctctttataatggataaaatcatttagatatctcagatcttcttctgcgcatcggtgatcttctatgagatcaagaagataatcattcatctcctcatagcgttcctgaaggttttgatattttttctgttctttgataacttttttatttttagccattgttacctgcctcctgactgctgattcttgaaagagttgcattgatgcttgattcacgtaaccgattattgatccccgggaacagaatcagttccacatggtgggtgagcctgccaatcagtgctgttgtcatccgttggtcataaagaacgttcacccactgtgagaattcaagattcgtgtttaaaatcaccgatttctgctcgtgtatctcagaaagataatcaaacagaagctgtgaaccggtgcggtcatacggaacatatccgaattcatccagaatcagtatccgggcactgttaagcttctttttcagtgcagtaagctttccgctgctctgactctcggaaaagagattgataagtccggcagtgcggtagaatcttaccggaatttcctgattacatgcagacattccaatcagaatggaaagcattgttttaccggttcctgttcctccatacatgatgacattttttcctgtatgataaaactccaggtctaacaggctttggaagctgacgtcttccgggaaatctatctcatctgccctgaattcctccacgcggtatctacgtgggaagccggcggtattgaggaacttgctcttcctttttgctgtacggtattcaatttcgtttgtcaggaggtttaaaaggtattcctgcggtgtgtctcctttctgctcgaaagcctgccctgcaaagttcgtggacagcttgagctgtttgcagcatgctgcaatggatttttctatatcagccatttgagacacctcccttcttaagggcggcatccagcattttcagatcatttctgaacggaatgaccttctgctgtggcagtaaaactttgttttcaagcggaggcagaagcggtacatctgcataggttcgcctgtaaaggctctgcagactgtccggatctgtggcattcagccggactgcttcgtcaactgttctgacagcactagcaaacccggttctttccgtaagttctgcaagcaccttcaggacacgtccgcgttccttgctttcgcagttatccatgtatatctgcatggtttgtggcatcatgtcatatatgccgctgtttcgaagagaacggggtttcctggcgatatatgtaaggtatggcagccagtccattctttcatgttcattgccgtaaaggcgcttatgacgcaccacttcgtgcatatctttgtccatgacaatcacatcagaggatgtaatcttgagatttacaatggactcacagaaagccggtgaagcagaataacggtgctttcctgcgtcaagagtaaactttccatatttatccgttgttgccgttgtgtaaagtgccgtatcaaacggaacggaaggaagcggcagtaaacgagccttatcttcttcaaacagtttactgataaagcggtcatcatcgtcatcatagtgctcacgctgcatatcgatttcacaacgatccagaagatgcttgttttctttcacaagatcatcaaagcggggtaccggtacaagttcgttgcggcgcaggtagccaaccttgttttccacgtttcctttttcccatccggattcaggattcataaaaaccggcttaatgcggtagtgttcacaaaagcgttgaaaccgctctgttacattacgcccgccacctttgatgatttcggtaacaatggttctggtattgtcaaaccagatttccgtgggaacaccaccgatgtgctcaaatatggcaaccagtccttccagaagacattccatgttttcgccataattaagctggaggaaacctccgttactgtagggaaaactgagcacaaggtacttagcctcgtgatgaagcctgtcattttcataaaaatcggctgttccaaagtctgacttaactgcagccgaaaccatctgcttcatccttgaggcgtttaaatactcttttggctgtatgccgttgctttcttggtgcaagcttgtctgcctgtagccattcatcaatcaaaggtttgaatgggtcaagattggattcgtgaacctctgatgatgcaggtttgggagacggattgttaaagtcctccatatccacatattttttgaccgttttccagttaaggccggtctcagatgctatttcagaatatgtatctgatccattgtagttgacattctcctttcctccttgtctttattgtttggactacaataaagataaggttaatggtttttggatatacctgcaatggatcttttcatgggaatgctcatacttggtggctgccactcaagcgctacaccgttcctgagcgcttctagcgaatgccttgcaactttctccaatttggagatgcaacattctccaattcccgtttgcaactttcggtaattctattttacaataaacagttttggagagttttgttatcatagtgttatcacaacattcattacaaaacgccatatgaaaactattcagaaaaaaagtaaaggaagagaataaattactatatttcgtgacgacaaagagattccccgcgaaccctttatccacaagggttgcggggatattttttctttgcaaactgtcaaagacaagaatataattgtggaaatttttcaaattcttttctaagtcttacctgctgcttatcattacttcttaaatcagatggcaagatctcattctgtttattgttattattaataatttcttctattatcttaggagcactacacacaataaatcatatcggtacaagaaaatcttcttttaaacgttcaacaactccgatagttcctgttaattgtgtaccgttaataatagttataccatgtacttttgttatattgtcattgtctatttcataatcatttactagtgccgtcaatccattgttatatgcccagaatttttccggttgttcctgtaccgtatccataatgcctaaattaattttattttttctttttcctgctcccaagtaatttctcggattgccagaaaaaagatcatctttatacaacaaataaagctttcgtatccaacttccttttctgccgttacacaagatttccactttactcccttgacttcaaaggcttttccatttccttccacatcgatcaacttttcgctagtaattcttttactagaactattgtaccaacgctcgattgtattatttcccacctctagtgcaactattttaacagaattatcaccggctaaatcatttactaatttttgtgctgcaatttgtacagtgtttaattcctcctgaacttctggattgtttttttcattcatattatgaacataccaaaaataaattgtattaatatcgccttccttgatcgcctcttacaactcactaactgaatcttttattctatctggtatatcatttatatctcttgcaaaaacccacgatgctgctacgtttaaatcacttgctttatttactttagctaagtctgtctccgttggatttttcttcatataagcttgagcaacaactgcaaatcctgcatctctatctatataaatcaaatggcactttttatcgtcacttccatctgtcaatgcttcctaagcaaccgataatatcttcaatatcatatctcaattgtagtgcatacaataataatgaattgtccccgtataaatctaccaaatcagttcgtcctttataatttcttacataattatacatcatctactccttatcttatgcacggttacattttttatacttttatttacaatatctttacgcatccatcgctaaatactttaggataacttaatgatattatctcattttgaaaagcaactacatatgcacgaattgtaccttcaccaaatctttcatgtaatatcgtctttccatcagcatataagctaagctcatctgaaattccgttcaaatatgggaatctcttactcttcgctttagactctggaaaacatacatcaattgcaattacttgtccttcgccgtatcccggataatttatctttgcccctggtggcactataggcaactccttatccttacttgccagaattcctttttccattctttttatttcttcattaactgcaatacatatatatgatttccatcccggtgcatttaaaatatctcttctcgtttcacatagcaaaattaactcacgtaatttttctggattagcgtgacctgttctaaacatagccataaaatattctctgtactgagccaatgttagtggaacaatatccagcctctgttttaaatctccttgtacataccaaattccatgtctaaatgtttctgccgtattcgtatctattttcactgcaataaacattccgtatactggtttgtcatattttaaaactgcatcggatacatgccttcttacaggttctccctccattgcttcctgacgtgatgatgttgacatagtaacttctgttaagatagtaaaatcgttaaattcacaatataagtcaccttttccaccgccagctgcagatactggaagaaaatcagaatccaatttaaatcctctcacctcataaggtttattgaccatatgatcaatagctaaagatgctctccataaaatccattccaaatatgcaggagtttcatcttttggtacttcaataacattatcatcatcgtatgtacgctttccaccgcccttgatcaataattccatatagtctgctatttcttgccattgattgcattgctcttttgcatactggatttcatccgtttgaaataatacattttccaaacgtcgtctggcaatattaatttctgttgctgtgttcaacggaagatcattaatatcaaataaaatttgtctactcttcatctgctttatcaaatcattcaataaagccttagcagtatccaaattatccgttggtaattctgcaccttcacataatctcttatattgaaccgttattggttcttcattcgatgtagactttgccaacctttcagccagaatatgtttagccggaacaataaccattcctctaccttttcgctgtaacactcctgaaatacgtaaatatcgcatgttcatatcactatagtctaaaaaattatctgcttttttatcatagtgctttccacgttctgcaacttcttttttatcaaaattacgctttgatggtgcttgctttctacggatacgcaaatccaagatattatttacaacctcttcaattgaataactcggattcgtcgtatgtccccacaacgcaaattctatccttgtaatctcagaacttcctgtccgcttctctaactccaacataattgccaatatccacctcaatggtgaaaaataagaattcccatctggcgtagcaaattgttcaacactcaatgctcttaaatagcactcttgtactgctggatatgtatctgcttttaagaaagttcgtccaaatggtgttatatcgtctaaatttcccagttcctcttgttctacatctttcttcttcacttgtggatagatgaatccattttttgaaaacatcaaacgccacttccgagcatgactaccagatgtatctttaccagcttcattttgaataattccttgatcgttaagaaaattcatgaagccaatttcattctcttttccacgaagttttcctacatacggtgaatttgcaaatactttaaagccttcctgtattctatttggatttcgtaatccagtatttcccaccaaccagatatctattttttcttccatacgtcttctccattaaatccaacaaataaatattcctgtactttatttcgatttgtcttagcatgtttttgatttccaaaagaatatgtataatctattggcactacttctacatgttctttatacttagacataagcgcaaccatttcatcttgtgttggttgactatttgaggaataagatacaatcaaaatactatctgaaaactttttgaacagcttatcaaatgcatctgcagcaccttttctagttgaaaatggtgtaggatatgatttaaatttctttgttaccgtattttcttgtatttctacgcctttccaatctcgtgccaaaccttcaacaaaatggtatctacgcacatattcattgtctgacaatggagaataatacggtggatcaatgtacaccaaatccggatgcttaatttttacttccattgcatctccatgcttagatttattttcgcatccattatcaaaaattgcattattaatactttctactgcttccagaaattgttgttctaaagatttcagcaaatcatttcgtccgtcattataacgatctccagtatatgtgaaaattcctcttggtcttttctttgtacaggctctaatcagagctgtcattgcaattgctttcttgtattgatctctaattccagcgatgttggttcgcaaaatatctatcaacttattttcttcatctttataatataagccttgaaatgtattttctacaaaatgatcagactcttttttctcaatcagtaatttttttgcttcctccaaaggcaatataactctattattttccaccattgcttttgtaaaagttgctgacattgccatataatcattactaatcacagtttttccctgagccttaaacatataaccaacaattccagaaccagagaacaaatccactactgcatcaaaattaaactgcgaagctactgcccaaatttgtggcaataatttacttttggatcccatgtatctagttgctgggtatttcattacctgctctggcaaaggtttcggtactatttttaacatagacttctgcttaggcaagatatcaacaataatatcttcgccttttcttttgttcccattgcaagaaatgtacctttttgtttgaataacctcaatcttataatccgcatataactcatgaaccagtggatgattagaatttgtcaatattacatgacaacctaattcctgcaatcttttgacttctttagccaattccacatgatcctcttcataaaattgctccttcgtatatctcttaaaatctgaatattctgaaattggcagatatgggggatctaaaaagataaaatctcccggttctacatattccttcaatactgataaataatcaccacatgttatagtcgcttttttcaatacctctgaagcagcatataaagcctcttcatcgcaaaaattcggtgctttatactttccaaatgggacattaaattgccctttcttattgacacgatacaaaccattaaaacatgttttattcaaataaatagttcttgctgctgcttcttctttttttagtttaagccaatctaatgaacgtacttcataaaaatcttctttagtatttttatattttttcagatatgctataacattctctacgttatcagcaacttgtcgatacatattaatcaactctggattactgtctgcaattattgctttatccggacttagtgcaaaaaataatgcccctccaccgataaatggctctatgtattttccatatttttgaggaattttaggcatgatatcacctaacatctgagtttttccaccagcccatttcataataggcttcgcctgtatatgtttttctttctttaaaacttgttccatcacgccttttccccttcaatctctattatttccatgatatcgctaatatcacattttaaagcagtgcaaattttcaccaagacatctgtagtaacattctcgttttttccaagtttcgccactgaagcatgactaatgcctgcagccacacataaatctttctttttcatatctctatcgataagcaatttccacaattttttataactaaccgccatattttaccccctaaaccatctttcatctttcatagtaaatattgctatgtagttattttatcatgcaatttcagcagtatcaacattaatttcagcgattgcagacttttgcaaacacttgttcccgattataagaccttacttcacttacttcacctacttcacataactacttcacatagaattataacagtccgttttttctaatataaagatatactcatgtgctaacattaaaaattttctttctcttccctcccaataataagctgatcgacaattatgctgttcctttataatgatttctttaagtttaaatccagcctctacaaatttctgcatagagttcatccccaaaggcaacacataacctttccttcgtatatctccaatcataattgcacatattccttgcctctttaataccctatatgattctcttgcaacctgttccagttccttcaagaacttctcatattttaaatgcgaaatatctcccgggatttccttactgtatcgtataatatctgcatatggcggatgcgtacagataagatctatactttcatcttttataaatgataaattatttgcatttccctgttttgtgaatatttttgatctttcttgacaagtaaaatttagatttgtgttagataatttgacagcttcagaatttatatcaacgccgattgcatttcttcccagcaactttgcctcaatcaacgttgtgccactgcctaagaattgatccagtatccaatcttttttctttgaatatcgtaaaataaggtttctaggaatgtatggagaccagtttcctctatattttcctgaatgtgtagcccagcttcctctttccggaaaagaccatattgttgtatcttctaatttaaatttttctggcgcttctcttataaaaatctcccctttctttttctgaccattaaaatagaaaagtattatgccgagttcagaaagtaaaaacacagataaatcctaagtaagaatactggacgtatctcggcataacatctgtctcggcataatccgccctgtggtgtacccacaatggaatcctcgtattcatcatcaatcatgattccactgacaagatactttcttatgatggaaataacaactccatctttgattgttctaccaacaatggtcatcaacttatcatggtttactgtgtcaaagaattgaaatatcgttccattggtgcgttgtcatatggacatccagctttgctcatgctttgtgttacgtggactgattcacaatactcaacgaatgctttcgatgtatactgtgccccctgatcactatgaaggagtaattctccttttcgcaccggctacgaatccaatgccttctgtaatgtccggatggcaagttctgagttgatatgacggtccgtaatattcgcaatgatgctgcggtcatacggatcaagtatactgcagttataacgcacctctccatttttcaggaacagataggtaaaatctgtacaccatttttgattcgtccgctcagcagtgaagtcttgggccagcttattatcaaataccttatgtggcttcccatgcatatactccggctttttcggacggacaatcgcatacagccccatctctttattcatatacttatgaatggtcacaggactgtaacgaaaccctttgcgtgccagataaacagccatgctccggtatccgtccacgccattgtgcttgtggtaaatctcacggatctgcgcctgtactttagatttttgagtacagaaatcagccttccggtgtttcgggtagttatagtaagcattgggacagatattcaatggccgtagcagccagcgcagccctagatctttctgatatttttcaataaaccgataagcctctaatcgatttcttttgcaaagaatgccgccgctttttttaagaagaggttctccttacggagttcttcattctctttgcggaacttaagcatttctttcatataatcgtattcttcttttatttccgggcttgtctggcattcttcgcgtaattggctgcaccacttggagataccggcttttgagacgccatattcagatgtgatactttggtaagtgcgtccttcttcttcgtggagacggacaatcttctttttaaactctggtgtgtaattctgtggcatgataagaacctcttttctcatcgtttttagtatatcttattagccactatcgttacaactttattatagcacttcagttaacacttgtgctatggcttgttgtacatatctgtctgttactgttggtactcccaggtttctgacaccgccatcaggctttggtatctccactctccgtactggttgaggtttattatactttcttgacctcaactgctctttgataattttgccgttctttgcaagatggtgacttccttcagattccacctcacgatggacacccttgtcaatcggctatatacttcctcgttgcctaggcgtatttgggactttcaccctttagagcgcgcccatggcgcgcaaaccaaacagccgtcattatcataggataatgacggctgttataaaaacctgctaaatatatgaacttctaactgcacttacagtttatggcctaagccccattccgccttccagcgtaatagtctcaccactcatgaacttgaagtccggagatgccagctgaacacagacgcgtccgatttccttctccacatctccatagtggccggccggaggcatctttacattcgctttaaatgcatctggatatgccttctcgaaattctcaagctgaactgtccatgcaagaggacacacaacattaacgttaatcccgtctttgccccactccgtcgcagccactcttgtaagaccgcggataccctcttttgctgccgcgtaagaacattgtccgtaatgcccgaacagccccgcgcctgatgcaaagttaataacgcttcccttcgcctctgccagatacggatagcacgcctgcatataataataagccgcatacagcccggaataaatcgccaggtcaaactgctctgtcgtgtgatcggcaattgaaactcctgaagcagatgcctgtgcattattaatcagcacgtcaattcttccaaactcctcaactgtctgcttaataacctgttcgacaaccgctttattatcagcgcctgcgcttacgtcagcctgaactgcaagcactttaatcccgtagagcctctccagttcttcttttgcatcttccagtttcttcacattacgtcccgtcaaggtcagattggccccctctttcgcgtatgcggtcgcaatcccatagccaatagaaccacagcttccgtcacttaatgtcgctcttcccccgcctgtgataatggctgtcttacctgttaaaaatcccatatgaaatacctccctttttatctttcctgatcgtacttcacgtacacatctacctttggctgagaggcacagcccgtctcaaactcatttccaaggaacgcatccaccagaagttccctcaccttatccccagtcgtaaaagcgcccatacatgcaatattcgcatcattgctcaatcttgcgcgctgggcagagtatacgtcggaaaccagcgccgcataagcgcccttgactttgtttgccgcgatagaaacaccaattccagtcccacagagaagaatccccctgtcgtattctttcgctgccacagcctccgctactgcaaaagcagtatgcccataaataggatcctcgcttccgaaatccttcacctcgccgtatcccttcgcttcaatatacttgattaaaacttctttggcggcctgtgcatttggatcgcacccaattgcaattttcattaccttttcctcctcacttatttcaatttgtatttttatctgactttattttttctcgatatccataatcatattgacccgctcctggtgccttcctccctcaaattccgcattcagccattcttcaataatcatcttagccaattctattccaataactcctgcgccaaatgcgagaatattcgtattattatgctacctcgaaagttttgcagaataaggctcgctgcacacaactgcccgcactcccttcaccttattggcggcaagggagattccgactccgatccctattttcgtattatattcctgcctttgctaaagcctccgctttcattataaattctctgcatcggaatagcaaggcatactttataaataatcagacaattatttctccgaggtgattaataatccggtcggcctgggaaatatcctgagggcctgatgtcgggttcctgtatccgtagcagaatatccccgcctgatgcgccgattcgaccccggcatgggaatcttctactgtcatggcttccccggaagacacttctgccagttccagaacttttagataaatgtcaggagcaggcttcttcttttctgcctcgtcaccagaaacagtatagtcaaatagatgttctattttcagaagtcttaacgcgtcattgacaagcatacgggtagaagacgatgccagcccgattttcattcctttgtccctggcttcctgtataatatccagaagcccttctgacggctgaacatggttcgtttcaatctgctctgccacaagctggtactgccttgcctccagctcatacggggctccctccagagcgcaattttcaagcacttttctccagaatccgcttgacgatttcccgacaggatccggcattttctcactcatattaatcttaagttccctaaacattctctgccgggcattctcatgcagcggctcactgtccagaatcacgccgtccatgtcaaaaattaataattttctttcttccattatcgaatcctcgcaagagttttaaactgttctctcaaagcctgataagaggccaggtaaacctgatataattcttcatacacgggaacccattctttaacaggctctatgtttttcttaatcttcagcatcgcatctgcggcttcttcaggagtgttatattctcccatgtatgcggcattcatataggccagccctcccggggcgcctaagtttacttccggtatttttatttctttattaataacagaagcttttatgctaagccagatgtcacttttgctgcagcctccgcagcagatgatatcctgggcatggattcccatggccgccgcctgattcatattatcccgcagcgcatagcaggccccctccataatgcttctcatcatttccgcccggttcgtattaaggttcagccctataaacgttccccttgcgtccggatcccaaattggcgccctctcccctgccatatagggaaggaaaataagcccggtcggccccttagccaatccttctatctcttcattgatgcggtcataggcgtcctgtcgggcagtctcgcctccgaaaagagcgtcccgaaaccaccttagagaccctccggcagtgttcatagcaccgtacaaaagagtgttgtctttcttccttcccttcagataagaaagtttctctcctgtaacaagccggtcaaacccgaacataactaccgaactggtccctgtcatctcagaaacgcgtccttctgcatatacccccatttccaaagcagccgccactgcatccacggtcccggccaggactactgtcctttcagaaagcccggtcagacgggctgtctcttttgttacatgtcctataggttccatacattcatatatctcgggcatcaaatcggtatctgcgccaattgcctcgaagagttcctcactccagcactccttgtgaacatcgtaaagctgggtaagagaaacatgagaatcatcaatcgtaaactcccctgtcagtttataattaatataaccattgacctgaagcagtttatagcacttttccattaactccggcttatttcttataaaccacattaattcagtcagggcgaaataagtgtccagcctatttcctgtaatctcgaatactttttttgcccctatcgtgccttttatcatctcgtattcttctatacttcttctatccatccagattaacgcatcatgaagcaggccgccatctttcgacataggaatcactgccggagcctggctgctgacagagattaccttgatgtcttcgggatttaccctactctttgcaagaatggcttgtatagattccactgcgcagttccaccagtcttcaggattctgctgcgcccatgaaggctttggaagaagtgtgccatattccctgcctgcctctgccacaacctttgccccttctccgaaaagaatgcatttcacagttgtagttccgatgtcaatccctatggaatatttcatacctgactcccctttcttcttaagcaagcacttctgggttacatataaatcttggcttcccgccgtctagtattctctttacgtcagccagcacgatatttgtctgatgtcctacgatatctctagccgatcctgcaagatgaggcgtcagcaccacatttctaagagacaggaatttatttcctgccggaattggctcaaccgggtagacatctaagcctgcaccggcaattttcttctccgccaatgcatcatacagagcatcataatccagcacttttgcacgggccgtattgacaaaatatgccgtcggcttcatcagagcaatcttctccctgcttacaagcccaactgtctcagggactacattacagttaacgctaataaagtcagactccttcataaccgtgtctaaatccaccttcttagcgcccagatagtccatctgttcctgagatacataaggatcatagacaagcacattcatatccagagcatgtgcgcgcttcgcaacttcttttccaatcattccaaagccaatctgcccgaatgtctttccatacatctccgggcctcccccatacagagcaaaaggagccgtgggatccatagaccattccgacatagtttcagcacgctttcctccttcatcatcatactgtacattggtcaactgatccgtatattttaaaaggtgatccgtcaggctgatatttttagaaacagccataagaagtgctattgtatgctccgctacggcaattgcatttcttcctcccgcccttaacacagggatattcttctttgtagcggcctctatgtcaatacttgcaaacgcctcattcctgcagcatacgataatcttaagtttatccgccgcctcaatgacctcctggttaatatcttcaaattcagaaataagaagttcgatgccccggatcttttctttcatttcaggaaccggcattttctctccggtcaccccatatccggcaaactcgtaatcttttgttatcgtctccagcacatttagataacttttgtcaaaccttgctgtaatcagtgttttcatgctctgtctcccttccatttctgtccgtattttgtcatgaagaaatcgtggaaaaattctacgtcctctcttgatatttctgccggtcctccaatgctctgggtattaatgtaaatcaatgctgtcttttccagaacctgcgagcctgtaaatgcctctgccagattacgccctatcgtaattgccccatggtttgcgattaatgctcctcctctgtcctttaaggcctttacgacctcatccgccatctctttcgttcctggcatcgtatatgcagcaagccgcacatcccctcccagtatctgaacctgatcatcgcagattggaggaatgggttttcttgctgtagccatagtcagcgcatatgtagaatgggtgtgtacgattccgttcacttcaggcctgctcaggtaaacagcggagtgaaccggaacttccacagaaggtttcagccttccttcatactcaaatgtcttcatatttaccaagaccatatcatctgcacacagtctgtcataatccattccagatggcgtaatgaccatatactcttcgtctacacgagaggaaatattcccccatgtgcctgctaccaggccgctgtgatacatcttcttcgcagtctcgcaaacctcaatctgtgcaatcttcaccttatctctgttcatagttcttcctccttcgccgtgctcatgcttttaatatttgtactgatataataaatgctctccgttttggaacctccttatatcagatacgatctgctttgtgtgatttacaagaacgtcatctgtagcccctgcaatatgcggcgtgattacaacattgtccagttccgtaatatacgggtggttgcttgcaatcggctcactggcgtaaacgtcaaatgctgctcccgcaatccgtttctccctaagtgcatcaatcagagccgcttcatctaaaatcgctcctctggaagcattgataaagtacgcggtaggcttcatcatagcaattctctctttgcttataataccggaagtttctgacgtcaccttcatatggcaagtgataaaatccgattccctcatcagttcttccaccgtatccaccttgcggataccaatctcttcaacatctacttcgccctgatatggatcgaaaatcaaaagctgcattccaaatgccctggcaatccttcccactctcttcccgatacttccgtatcccagtattccaaggctcttccctttcagctgtgtccccttaaataccatgtagggggcatccattttcatatcccatattacatctgcctttaagccttctttcgtctccttatgcgcgtcggggctgcccgtatatgtcccttccttaagcgccttataagccattgggatttttctggcaacagatagcatcagcccgattgtcatctccgccgtagaatcagaatttcttcccggagtaaaaagcacaggtatacccctttctttcgcggcctccatatctacgttcacgggcgttgctcttgtacatgcaatcaacttcagatttggcgctgcctctatgacctttctcgtgatatcatcataacttgtaataatcatatccgcatctttcactttctccgccaattcttcttccgggatcttaggtagccctaccgcccagccatccagcactacttcgcccatatcgtacaatggcttcagttcctcttcattatattctgccgtaaaaaaaatcttcatgttctaatcctccttgattgcctgaatctttttattcatttggtggcggtaatcccatatctgctgattgtgaagccttacctgtcggaacagttcataaagcaggtcgtactttttcgtcctctgtaagttaggctcatatgtctgccggaacgtacaggccttcttgaccgcctcctcgtaagaaccgtacaggccaaacttcactcctgcaattatggcaactccttttgcccccagttccttaccctggggaatcataaccctcctgcccattacgtccgcaatcatctgcgcccacactgggcttttggctccgcctccggccagataaatggtagcatctttatctatattctgcaggcagtccctgatagaaagactgatgccttcatataccgcccgaataagctggttccttgtcgtaacctggctgataccaaagaaactggctctggcatatgggtgatagaaaggagccctctcccccgccacgctgatatagggatggtagacaactcctccgcagcccaccggcacactctctacaatccggtcaatctcattgaaatcctttgtctgcgccatgttttccagcatccagtctatattgggcgttccattcaaggtcggctggagttccacatataagtcctcaatcgggtgcttctcatagcgggagttctcagcgccaaacttacagtccgtctttttcattacaatctcactggcacatgtagtccccagtattacacaggcatccttctcatgtatggctccaagccccacagccgtagccgatgtgtcaagagcccctgcaataactggcgtcccggcagccagccccgaccacgccgcaaattcctcagatattgtccccacgacactatcagaacttactgatgccggaatatagtcccgatattcataaatatccatggctttcattaattcatccgccacattccccgtctgtgcgtccagaagagacgtaaaactatctgtaatctctgtcgctatcactccggtcatcttatagcgcacccaatctttacagaacataatccgacttgctttatcaagaacctctttccggtttgtcttcatccatctgattagaatcatctggtttcccaaaagcggcggggttcctgtagttttatgatacagtttaccaatttcagggtactcctctgtaatcctctttacctctgccactgcacgcccgtcacaccagaggattgcattctgtacaggatttccttcttcatcaataagccaacagccttctccttgtccggtcactccgatccctttgatttcctcgctctttaccgccccggagtctatcagttcctttatgcaggacttgaccttatcccacacaagcagcatatcctgttcttcccagttccctccgtcattaattgtttcactttcccggcttgccacttgcacttctgttccattcccatcaaatagaaccgcttttacattggatgttcctacatcaattcccagaatgcactccatcaatgtctcctccttttaatctcgccatgcacgatatacctccttttaagagcagcatatcatgatgcgctcgcaaatattacatttcttgctgtcgtctcatccgtaatcagagtgtcaatacttttagtacgaagcgccgcttgtatagcctccaccttctcatctccgcatgctaccagaattacattgccaatccctcttaggttctctacgctggcgtttagaagcctgtctgtcagcggacagttatcccacgagccatcttttcgtatcgggttcattgctatgtcgcctacgaatccttctttccgcaatattttaatgtcttcttttgttatatgtcctcttgtgcacattgttgatttctctgtaagttctcctactcccagcacggcgatgttgcattttgtcatcagttcaaatgatacctgtatgcttctttccttcatcagcatctgctttgtgttttcatgctctaccaccaccggagcatagagcatataacttgggcaatccagtttgttcgccagattcctcgcaatctcatctgacttttctaccttttgctcgatattctgcgcgcccataagctgaacaaccctgcactcattccttttgtgatataccatctgattcacgacctcggccagagtccttccccatgaaaccccgatgatatcgccctgctgaattttgtcattcaagtactgcgctgccacatttgccactttataaatgaccgtgtcacgttctccgtaatcacttgcgacaatcgcctgcctaagcccaaatttattttccaatgtacactccagctctatattgtccctttcatatccctgaatactaatattcacaattcctaaatcagcaagagaatttataatctgatttactttctgtctcgtaaaagaaagcctctttgcgatttcatcctgcgtcattccaagaatgtggtaccaatacgcaattttaatataaatatcctctttcatagaaccctccatattacatttgtatttttttattacatttgtatttatagtataacacttttctaccgtttgtcaaacatttctttccataatttataatacccatccggacatcaaaagctttcatttctcttatccattggcaaattacataagtactgacatgaatcgctccgtcgcacaggaaattccaatgagcctccgattacaaaaatcgtatagaaaaggaacagttgcttcatattataaaagtcagggaaaggccatgccctcccccgacttttccatctttaaagcagctcgctaattccgtccgccatcgctgttaaaataatacagcatgatgttgcacctgcgtccagcacgcctctggaccgctcgcccagcctgctggagcggccaaattttgcaaccatatctttggtagaatctcttcctgccgctgccgcccttttcatctcttccagagcctctttaaagtcctgccctgtctctccggcctttttcatcacatcagccgcaggagccaacgtatctacaagagttttatcccccaccttagcatctacaattccatagagaccgtttaaacctgcctcaagcatagcgccaaagtccgccggggaaatttcatctaaatcttccccggcctccgccatatccatgaaaatcgttccatagattgggcccatagagccgccgatttcatttaacagaatcattcccagttcatccaggccttccgcaaaagagaaatcttcatctttaaagcgctcctcaaatacactaaagcctttattcatattcattccgtggtcgccgtccccaatcagtccgtccacttctccaagatacgccttattttcctggattccttttaccatacgcatcaggacaggcttcccggcttcatttttaaatgtactcatacctcttgcctcctacacttgcttaagccccatagaatttgccggcatatcaatcagttccttcaattcatcatcaagtttcatgattgtgagagttgcccccatcatttctaaagacgtaaaatagtttcctacataagccttatgcgtctttatgcctttttcctgaaggagacggtcaatctcgtcataaagaacatacagttccatgattggcgtagccccaaggcctgaaacaagcactaccacttcatcgccttctacgaacggataatctgaaactacaacatctaccatacgttttgccatcttatcggcgctctctaactcgcacacttcaattcccggctcgccatgatgaccaattccaacttccattgttccgtccttgatctcgaagttcggatgtcctactgcgggaagcgtacaaggtgtcagtccgattccaacagaacgcgtattatcaatagccttctgcgctgcagcgattacttcatctaaatcaccgccctttgctgcttttgcgcctccgactttccacatcagcacttctccggcaactccacgcctcttctctctctgatccttcggagccgatgcaacatcatcattagccacaactgttttcaccgtgattcctgcctttttcgccatcttcacagccatctttacattcatgttatcaccggaataattcccgtacaggcacgcaacaccttttccctgatccgctactttacaggcatcaagaaacgctgccgctgtgggagaagaacagatttccccaactgctgctgcatcacacatattctcgcctacatatccgataaatgcaggcttatgcccggagcctcctcctgtcactacacctactttattttcaggaatgttctttgcctttacaactcttccattgtccgtagtttccacgatatcagaatgagcctttaagaagcctttaagcatctcatctacaatattgtccgggttgttcattatacgttgcatataatttctccttccttcttttacacggttattctataacgcttctattaatcctccatgtctggcacgagaataactttcaatgctccgttctcacctgtcttggcaatatggaaaccttcttcccatttctccagcgggaacttatgagttacaacaccctctgtcggaagcttgccgtttccaatccattcaattactgtatcgtaacagaatgggcttaagtgtacgcccagaaggtctaactctttcctgtcggagatgatgctccagtctactgttactggctggccgaaaacagagaactctacgaaccttcccatcttacggatacaatccagtccctgctgtacgctggacgggtgtccgcttgcttcaatatagatatcgcagccgtaacctcctgtcagttctttaattctggctactacgtcttctttgcttggattcataaccatatctgcgccaaattcttttgctttcttaagacgtgcatcatttacatctaaaacaataagcagttttggattcgcctgtttaagagcgcctaccattccaaggccaagcgtccctactccagactgtacgactacgtccgtcgtctttacctgcgcacggtctacacaatggaaagaacatgcgtaaggctcaatgagggctgcctgctcaactggcatatctgccggaacaaaatatggcaatgcttcttttgtcagttttacatactctgccattccgccatttacattgttctggaatccgaacaagtcatgcttctcgcacatccagtgacgtcccgtcttacagaacatacactctccacacggaacaatctgctccgggcagatgcggtcgccaattttccagtcgccctttacatttggtccgatttccacaacttttcctacaaactcatgtcccggaatcataggttcttttatgtattttggctgtccgtcaaatccccagaaacttgccgctcctgcaaatgcttttgtatcgcctgcacagattccacaagcctctaccttcaggatcatctccccttctccggctctcggagtatctaccatctcaaaacggtaatctcccggcgcatatgccacaatcgctttcattttatctggtaaatttctcatattttttccctcctgtttttaatttttttatatgtcattttatttctcacgaatacggtttcctgtctccaggtcaaataaatgcgtcttctcgccgcgcacttccagtttaataatgtccccggctttatatctggtctcatcgtctgtaataagcatcagaagcgtatcccccacatggatcccaatatgtctctcatcgccaaggttctcaaaagtagcaaccttttccgaagtacctgcagaatccgggcctccaattaaaacatccataggacgcacgcccatcttacatttgaatccgttgctcactacattattatatcgctttggaactgctatcttaaggccgctaccttcgaatgtgaagaagaatttctctccctctcctacaattgtcgtctccagaatgttcattggcggctcgccgataaaggaagcaacgaactcatttaccggatcgtcatatacctccgccggcgtcccgaactgctgaagcactccgaagttgataatcgcaatcttatctgccagcgacatagcctctaactggtcatgagttacatagattgtggtacatttaatttcattaattagacgcttaatctctgtacgcattgcctgccgggcttttccgtcaaggtgagacaaaggctcatccatcaggagaagttcggggcggcggataatggcacgtgcgatattaacacgctgcttctgccctcctgaaagcttaaccggcattttatcaagaagatcatcgcactgcatcagcggagcaatctccctgacacgcttatcaatctctgccttgtctacgccttttgccttcaggttgaaggcaatattgtcatacaccgtaagaggcgggtacatcgcataatcttcaaatgccaggccgatatgtctgtccttaggatgtagattattcaccagtgtgtcgccgatgtagatttctccttttgtaattgtctccaggccggcagtcatacgcagagtcgtcgtcttgccacagccggaaggccccagaagcgcgataaactcaccctgctcgcactcgaggttcagatcatttacagcgtaatcattgagttttgcgccctttttcttcttaccgtcattatcgtaacgcttataaagatgttttatcgttaatcccgccatcctcttatccctcctgttccgctgcgagggctttcaccgccgcctcattatatctgctgatgtattgcttcgtctctgcatggaagaacatagagcgattcatctccaggtcaacgtaaatgtcctggtcaatcttcaccgacagtccattaggagcaatcatccgaagctgcagagcgccgcactctgtaataataaccgacttattaccaatgctttcataactgtatacactgcattttatgtaaccgtcttttggctcgaaggaatatttcacgttctgcggacggattcccacctcaatatcagtaagccctgtctcctctaattttgcaaagagatccttatcctccggaagctcatatgtcttttcaatatcattaaaagtaaaggagtatcctccggaagtctccgccagttttcctgctataatattgatttccgggtctcccataagctgagatacaaattcattgcaaggcatataataaatctcatcacttgttccgacctgcacaatcttaccttcattcacaatggcaatcctgtctccaagtgacatggcttccatgaagtcatgggttacatagatacttgtcgttccaaaattagcctgaatatctttcagttctgtacgcatcgcattacggagctttgcgtcaagatgcgccaaaggttcatccatcaggtacactctcggagaacgcacaagcgcacgtcccatcgccacacgctgcttctgcccattggagagctggctcggcagacgatccagaagattctccatcttcatcattgcggctacttcgtgtactttctttttaatatattcctcatcttttttgtaaagcttgctcctcaggggtgaggccatattatcatacaccgtcatctgcggatacagagcatagttctcaaataccatcgccgtatctctgtgggcggcgtctaccaggttaactgtctttccatcaaactttatcacgccttcttccgggagttggattcctgcaatgctattcagaattgtagtttttcctgctccagcaggaccaaacagcacgaaaaattctttgtcctttatatcaagagatattccatcgagagccgtaacttttccaaattttttcgtaatattttctaattgtattcttgccatattctcacacctatcccttcactgcaccgaaacttaagcctcgtactaagtgcttctgtatacaaagtgcaaaaataatcgccggcagagcggaaatggtcgcggcaacagccaactgtccataatgtgcactgtctgttccaaggaacttcgtgattgcaaccgtaatcggctgaacatttgtgcctcccagcatcagcgggaatgtaaaacaattccaagcgaagataaatgccagcagggctgcagatacaagaccaggcttaataaggggaacaagattcttgaagaaaatctgataccaactatatccatccacctgcgcggcatattcaatttccacagaaatatcctcgaaatatccccgtaccacccagataagaagcggcatagaaatcagctgatacacccaaatcagcccaaagtaggaatcataaatcccaaacatctgataaaccataaataaaggaagaactaccagaatctcaggcgcaaacttaaaggaaagaatctggaaagcaatatcctcttttttcttaaaattatatctcgcaagagcatatgccgcaggaaccccggctataactgatacgataacagcgcctcctgccacgatcaagctgtccagcatatactgcaggtaatccgactccagcaataccgctttataattgtccaaagtcgggctgaacaaaaatgttgtcgtgtacatctcagcatctgacttaatggacagaataagcatccacagaagcgggaacaaagcaaatattgaatatataatcaacagtccgttttggacaatacgtcccaatctttttgaagctgtatccatgcttaacatcctttctattatttatttttctttacaagcaaagcacctctactcttccaagccagcagcctgtttttgagcggcgcgctgcctcttaacaatttgtttggccacaatattaataaatacccacagtaccagaatatatggaagtgcatatccgaatttctggaactggaatccggtctgataagccgtcagcgacaagttcataagcgtatcgccaggtccgcccttagtaagcgcaaagataattgcatactcctgaagagccgccataagacggaataaaagtgctatgtacaaactcggctttaacatcggcagagtcaggttgcggaaattaaacattatgcttcctccgtcaatcttcgctgattcaaacggagatttcggaagtgactgcaggcctgccagcacaagcagcatacaaaaagaagtatttacccacacatcaatcataactgctgtcagcatcgcagtagacgggctggctgcccacgggaagttataaactccaaaaatattcaggaacttctccaaaataccaactgagttgttcagcatcagctgccatacgattgtcgccgtaaccggtgcgaccatcaatgggaaaatcaatgccactctcataatcttagagaatttgttattcagattatttaataagatcgcaattcccattccaagtcccatctcaattacggtactgaaaaatgcatatctcaaagttacccatactgctttccagaattggctggactgcagaatatcaatccagtttcttaatcccacgaaactatatgtaggcattctgaaagaatagttggtcaaagaataatatattgccattacgaacggaaccataatcccaatcgtaatgataagcgcaggcgctacaatcaaatacggaagtacccgtgtcttaaacggcagcacgttcagctcgttcacggcagcaccggcttttttctgttctttcatcccgattcctccaatcatattttttacctaaatccttcaatcttcaaggaatttttcccctgtcatgataaagagccaaggagggtcaggtaacccctcctcgactctaaccctttcagaaagaataaatccatataggttgatatactctttctaattattattcctctatttccagatcggctacaatcttatccagttctcccttaagtgtcttcatcgcttcctctgtggatgaatacttgtcacttgttacaaggtcctgaagtgtttcagcccattttgtcgtacactcgaagaagtacggctgaggtgtaaactgaatagatgcattctctgtaagttctgcgatagattcaagataattatctgcggaaccaacgattgccctgtattcatcgctctccattacagaagtgcgcggagtatctgggcttgctccctctgttcctgaatacagcatatattctgggcttgtgaagtactgaatgaaataccatgcagcatctttattcttagagtcagcattcattgccaatgaccagatccagatatttgctttcatatcatctgctgtctttccttccggaagcggaattgtagaccatgcaatattgccggattcctgagaagcgccttcaaagttctggaagtatcctgcgcttgtagcgtcaaacagcattgctgcctttcctgctccaaggtctgcacttgcctcataccatgtgtaatttgtccattgcggagcgcctgcttctttaatcatgtttacccagtaatctgtcatagcaattgcctcttcggaatcaagcttacatacgagcttgccatcttcgatagcgaagtcctgcccgccccatgttgagaacagtgacatatatcccggatgaattgttgcccactcacgtgtaccgcgcactgcaatgccataagaacctgagccattaaactctttcaatgcttttgcagtctccagcagttcatctgtagttgtaggaactgtcattcctttttcctcaaatactgctttgttgtaagcaaggttgtttaattcccagcccataggaagcgcccactgtgatccttctcctactttatgtcccggaacaagatcccatttcagtccgtctacaacggccgggataaaatcgtcaaaattgtaatccggcgcagtcttagccgggtcattgatgtagttctccaacggctccatatatccagccggagcatactcccatacctggtaagcacctgtcatgtaaacatccggcgtaccagaacggctgcttaaggaagtattaagtttatcaaaatagttagattccggtgtggaagagtacttaactttaattcccgtaagttcttcaaactctggaattttctcaattactgcctttgaatagttatgctcattaaacataacattcaatgttgtgccttcataattcttccagtcaaaatcctcggcattccctgcctcgtagtcttctgattcaccagcgttgttgctaacagtcttgccgccgcagccaacaagcattgatgcaaccatcgccgtgcacagaagaacacttacaattcgttttttcatacctttctttcctcccttattgtgaagtttgttttgcataaaatgtatcacttcagtttacctgcctgaattattttatgcattttgcctaaaatcatggtatcattttacgcgacttctgtcaagtatctttacacttgtcacatttcacaaaatttcatctactttttgcactatttttttctttgttttggttaattttttgtttgttttttatttaacaattcttttcggccttgcagttcaggggtttttagtgtatgattacttttagttgattaataagaacagaatccgggaggacagaagatgaaagtttttgaatatgaccatggatttatgagatacgcaactcttttaagccgcctcacacttctaaacctactctggcttgcgctgtgcattccgcttgttacagccggcgccgccactgcggccctttatcattctgccttctgcctcatgaacggagatgttcatattgcacgtaattttaaagacgggctgaaactttactggaagaagggtacaattgtatggattttcatggcgatactgacatctgcctttgttcttgcatattatcttctcaacaccgctaaaatccccaataatctggcactaactgtcgttgccggaattgcttttcttacactattgttagttatgctttggatctttcctgtaatggttaatttttccgggaagttatctgaacttgtatttaatgcttttgtcttcgcattcatgtacgctcccgtcacattgattgcagcagcattttatggaatcggagggttcttatttatccgcttcctctccacgcgtcttctcgtaatcctgtttggcccggcattaattgtgtattgcacgcttgtactgtttgaaaaagtatttcagaaatacaaagcaaaaaaagaataaggggatgtcggttaataccgatttttaaactctaaatcctaaaataagaatctcccataaaaatcagtgtttttcatacttgatattctgtgggagattcttattgttctttttctgtatatattttagggcgcaaaacacccataactgcatttttgaacatgcacattttttaagccgtcttttcctcggtttttccttcgaattttttaatctcttcatgaagaaaacgatgatatttattcatgttccgaccaatggcatacagcatgaattctttatacaccttctctgacgttcggtagttgaatcttcggaaactatcatttcccttgatatctccaaaatgtccttctgtctggatggaacggatctgacgatttagaatccctttctcactttggatgtttgcatgggattcctctttcaatgtttcccattgttcattgatcttcataactttgtttttctcagcatctttttctgcgttatatttatataagcatttcgctttgtgttcacaaccactacagtctgcacatccgtatacctcaaaagtctgggtataacccggctgttttttggtctctgtgcggatatgatgcaatcctcttccgtcatgacaaacataataccgttcatcctcaaatatctgtgttttcatgttgtaatattttccaatatcttctctgtaagcgcgtgttttccgtttttcatgatcctgcagcttgatgtaactggatatcttatttttctttaaatacagaagatttttctcgctacaataaccgctatctgcggttacttcttccaaaatctccccaaatgcatttttatgcttttctaaaaccggaatcagtgtgttatagtctgtccggtcattgcttacataagcatggacaatgaaataattctctactgcgatctgaacattatatgcggcttttaactgtccgttcagcatgtgatcttctttcattctcataaaggtggcttctaaatctgttttggaatagctgttcctgtcctttcccatgatctcaaaacattctttgtatcccataaggcgtttgccgcaggtttctaattcctcataaagctgctggagctccgatttcctcttcccttttccgtaaacaaacgcaatctgttccttctctgcgatctgagtcagatttttctgaagtttcaaaatctccaatggggaacagttgtcaatctcgatgatcgtattattggacaactttttatgttttgtcagttttcgcttccggttcttttcaatgacatctcttaccttatccattccttcgatcacaaacatatgtgcatggggaatgtcatattttatgccatactcattttcatctatccatgcattatacttctgatacagtgaatcaatcatatcgagtaagcctgcgagatgataattgatcgtccctctccacacaaatgtatagcggtttgcattggcctctatttttgttccatcaataaaaagggatttcaatgtgatcagtccttctttttgcaggcggcggagaaactggtaattcaactcatccaatacatctgcagtcagtcttttattcttgaactcataaaaagcatccctttttggtttctgacctttggtaagccagataaatgcaaggtctctttcgcataattccacaatacggtcaacagctctaatcccacgcatgtttgcgtaagtaactacggcatacatcataattgggttatacccggttcttcccttatctgaacaattggccaacaagccagaaaaatctaattcctccatcacttttttcagggtatagactggatcgtcgtcaggtaaacacaattcgaagaaactgaagttaattttctgttgccctaattcaaaaaattcgttataatacttattgtttagcatagttacattataacatgtaacggagaagagatggttgtcgttagccatctttttctcttttatggaaaaatttcaggggcagatgtgacctggtatgagtcacatctgcccctatttggaactatctatttcccgatagccccctatttggaactatctatttcccgatagccccctgttctttttatcagtttatctgctagtcgaatttaaatgcaactttaaaatctccgtgatttccagtcgcgtaatcgaatgctttctcccactcttcaatcttgaacatgctggatgctaccccatctgtcttcaggttccctttcatcatgttctcaattacaaatggatatgcatacgggcttaaatgcgcgcccagaatacccagttctttacggtctccgataatagaccagtcaacagatgtctctgacccgaatacgctgaattctacgaacctccccagtttacgcgtaactgccagtccttggataacactggatggatgtcctgtagcctcgatgtatacatcacacccataatcatttgtcaacgccttaatttctttatctatatcgcattttccagggttaaacacaagatctgccccgaattctttcgccttctccagacgtccatcctgcatatcaagtacaataagaagtttcgggttcttcattcttgcatatgtaatcattccaagtccaagagtccctgcgccagaaataacaaccacatcttcattggtgatgctccctctgtctaccgcatgtttggaacagccatacggctctatgagaagcgcctgttctcatggcccggaataaatgggggttttacccacgacggctgtacatcgtctccccagaacattgccgcgccatggctgcacttaagatcgccggcacagactccacatgcctctgttttgataataatgtcatctggcccgcatgtcggcgccggatactccgcctcaaagcgataatcgtccttagcataagccactagtgccttcattgttttcggagtacttcccttgttcgccataattcattccactttctttcattaaatttatacctcaaactgtccccagacagtatcaagggccttgcttaccgcacggtattttttatattttttatcataaatatcctgcatatccgggttaggctctaccctccctgatacatgtaccatacactttgccgcctctttataatccttgtacacacctgccgctatcgtagccgccatgccacagcctaatgcccccagttccttagcatctaccgtctcaatcggaagccccaggacatccgcgaacatctgaacccatacttttgagttggccgcgccgcctgccattcgtattgcttccggcttctctctggaagaaagaagtttctcaatatgcgttttgtgagaatatactactccttcataaatggcgcgcaacatatgcgccttattatgataggttgtaagcccgataaacgcccccttccctagaggatgagtattggatccatagagaaatggaaggaaatacacatcgcactcctctgcttttacagacgcaactttatcatttacaatactgtaaatactctgtccttctggaatcagttcattttccatgcaattttccagataccactccagatttcctgaagatgtagcgctgcactcttctacaaggtaatatcccggcatcgcaaacaatgagttcatagcaatgctgccgtccataaccggcttctcggatatatactcattaatgctccacgttcctgctattgtgcacatcttatctggcgaagtcacatctaccgccaccgcacaggcatcaatgtcaaacattcctcccgccactgccgtcccttcgggaagcccggtcagtacagatgcctcctcagatatcgtaccgcacaggtcataagagtaacggattggcggaagcatgtcatacgcttccccgattcctaatttttcaagaatatccctgtcaaatcttgcatttttcacgtccataagaccagacccagaaatatccgtagcctcactataagcttcaccggttaatctgaagcgcacataatctttaaccgagaatgcatattgaatattgtcatacacttctctgtaatgatccttaaaccatgcaagcagggacacttgctgacaggccataaattcctggcacagttggccgtgcacctcatcgtacacacctgtctcataccatttctccgggtacttccatgcccggctgtctgtagaaataatcccgttatacgcaggttttccatctttgccccacggatagaggcctttgccgtgtccgcacactgcaattcccagaacatctttcccatcaatgcctgctttcttaattgcccccttaatgcagtcacagttagcaagccacagttcttccatatcccgttctgtatagcctgacttcggagttatgacctttgtctgcttccccaaagtcgcaatttcctttccctgaaggtcaaaaatcgccgctttcgttgatgtccccccgttatcaagcccgattacatactgtcccatatttcaaagattccctccttatctacagtcttttacagcaaggcttctgcctttttaaattgctcatccagaaatctgcggttatacgccacaatctctttccagttttcttcgccgcaataccagaactctgccacatatcttcttactccctgacgatacagctgggcaatcgccggaggaaaatccacctgcccggtcccataaggtatctccctaaactttccgggcgctgtctctttcaagtgcgccgccgcaatgtacccttttcctgtttttatatctcctacaacatccttcgttgcattagatatattgcctacgtccgggtatacctgaagatatggcgaatccactcttttcacgctgtacatcgccttttctatcgtattcataaaatcattttccatcgtctccatagcaagcgtcacgccgtgggatgccgcaaacatcgtcccttcttccaggttccggtaaaacctctcttttgtagtctcatcgcttgtctcttcataatagcagtcatatccctgtgtctggataatgcggattcccatcttcttagcaaacaaaacccctttctgaagaagttccttcgcctcattctcccatttcttactgccaagcggatactttctctgcgcgctgaagcaaattgtctctattggcactccggtctccacctgtatctgcctcaactctgaaatctgctcgttgctccagtccagccgggacattctctcggcagtctcatctacgctcatttccacgtagtcgaaccctgcttccttcgcagccagaagccgctccttccaattaagttccggcggaagcgccttttcatatattccaagccgataatcgcattctgccttcattttctcctcctttcaattcataagtcatcatcttgaatgtaattatataatttttgtcagccaaaggcaatgacatttttccctttttcagacttttgtatttagtatttttagcggagcaaaacgtttttcacagaacatttttccaataaatgaaagaacaaagtttcctgccatataaaaatagtgtcttcgacacttcaactcccctgcccctcaatcatgagggataggggtttctttttgcttcattttgcttcataatggtcttatgaatatcttacaaaaaatttttatcgaacattatgaagaaatgatttatcttcaacatcctcgtgatgctattgttgagaatgtagaaaaaatgattcattgtggcgatccatcttatggtggcgccatgtatatttgtcccaattgtggtaatttcaaatttactgcttttcgttgtcattctcgcttctgtccaacttgtggtaacatgtattccattgacagaactactgctatgtcttttaagattattgatgtacaacatcggcattgtgtttttaccattgatgattctttgcggcctttttttcttaaagaccgttctcttcttaactgccttttttcggcagtcaacagcgtgatttctcgtatgttccataaagaaaataaatctgtattatttactcctggatttatttgcgtccttcatacctttggcagagatttaaaatggaatcctcacattcactgccttgtttctgaaggtggtgttggtaatactctttcctggcgacacttcaaacattttaactatcattttttacgtgatgcgttccaaactgctcttttaaatgaactccatcaaaaaataggtccagctttcaaaaaagtaaaatctgctatctatgcaaaagataaaaatggtttttatgttcgcgccatgcctaacaagtgtaatccttctcaggttatcaaatatatcggtcgttatcttggcagacctgttattgctacttctcgcattgattcttacgatggtgattttgtcaccttccattacaaccgtcatgaagacaataaacttattacagaaactgttcctgttttggaattcattgaccgcttaacacaacacatccctgaaaaacattttaaaatgattcgctattatggtatttacgctcgtcaccgtaattctgacaattttttacgaaaagccatttccagagaaaaacataacttttttctttcactcaataggtggcgtgattcaatcttacattcttttggttacgatcctttaaaatgtccgaactgtggaaaaaccatgctatttttagaactatattttaatcataatcctgttcctttgcatgaattatacgaaaaggctatgcaaaaacatagatgtcgttcgcctgcctcgttttcatatcttccaaaacctcttttctcatgataaactcaatatatcttaagaacggaggccacactatgaaacgtataacagaagcagagctcgcaaaggaactaagggaacagtacattaaaaatccaccagaaggtatgacttctaaagaagtccatgacatgagtgacgacgaacttctggatatggattatttcttacatgaatttgataaccttgatgatgacgattttggtgaagagggcttttacatcttttaatccaaaccgtctgattcactatgcccgcttttgagcgggctattttagtccccaagttctccgaaaggagaactttcctataaaggaataaagaatgtgcctcggcacattctcgcgccgagcgcggtcgcttacgacaaacttcaccttcgcgcgagtgcgcttcctcgcggagcgtttttatataataggaaatgaagtttcctaattatataaaaaaaacgcctccggcatgaaccggaagcgctttccctcttatttcctgttatttgattatcctacagcaagcgctttcttgtagtgtacattctcgctgtctttggctgcctccatatcggatacgtccattcctgatgtaagtgcctctgcaatattgtataaatatctcaaaagtgtaacacatcctgccattataataatcattgacgcaactgctgctaaaatcgtcattgtaataacctcctcatggattgttaaatttatatcttgcttctggaggtatcataccatttaggaatatttgtgtaaatactcaaaattaccaatctttgccaccgttcagaatgttttattgttacttttttgtcagtcttacttccgtatcgtttttttcacaaaatgacttttctataagcagtttttccgtcaaaacgcataatcttatttcttctgctcttattttttgtttgccggatgttttccaggcagtccgaactgtcttctaatctcatagaggcgctctacctgctcatctgaaaattcttttgctcctccgagcattcttgcctgatacaataaccgtgcataaaattccaccgactccatcttatgataagcatcaagaagcgcccctgcataagaaagcgccccatggttagccagaagaacggaatcataatcctgcagatacggggaaattgcatccggtatctccattgtgcttggggttccatacggtgtcagcggaacctctcccaacgaaattacagcttctggcataatcttagccgtcagccccatacccgcgattgcaaaacttgtggcatacatagggtgtgcatgtacgactgcatttacgtccggcctttcttgaaacacgcggatatgcatcttaatctcagaagatgggcgaaagccctcattagcctccagcacttcccctttcgcattcactttacagatatattccggcgtcataaatcctttgctgacaccatttggcgtacagagaaactcatcgtcatttatttttacagaaaagttcccatcattggccgcaaccatgcctctgtcataaacacgcctctttttgtaaatcttacctttcatatacaataaaccgcttaagtataggcctttgtcggaaaagacatacgtactgctgcccttgctttctccaggctttcgtattctcctccgtatatcatctgaaccatgatatttcctattgccgtagcctctgccggccctgcgattactttcttgcctgtatacctggcagtcagttcattgaggtaccctgcattagagcccccgcctattacatgaataaccgggtagttcttccctgtcagtttctcaatctcctctgccgcctgcttataagaagaagccaggctgttatagataacagatgcaatctggccaataccttctggaacctgctgcccgctgtcacggcaatattgcctcaccgcttccgtcatactgtccggcgccataaatctctcatcattgcagtctacaatagaatcaatgctttcctccgaggccagcccgcatatctctccaaaagacatgtcctgtgcaatctctctttttaccgactgtatcatccacaatcccataatatttttcaggtaacggaaacggtattcatatcctccttcattggtaaaattgaaatgcatactctccggccggcaatctgcctcatctctctccgttcctattaaggaccatgttccagaactgatatacaggatttcctcctccttcgcaggaaccgccagaaccgcagaacccgtatcatgagtagccggaagaagcactttacaggaaaatcctacttcttcttgaacttcctctgtaaattctcccacttcctcccctggaagatataaagttccgaatatatcttttggtatgcccagcatatccatcaattcgccgtcccatgatttcgataccgcatcaacaagctgagttgtcgtagcattggtatactcattcttcataatgccggtcagcctgtaattcagatactctggcatcataaggaagcgttttgcctctttaagcatctcagggctatcctcctttagtgccatcagctgataaagggtgttgaaatcctgtttctgaatccctgtcctttcatacaacttctctctggagataatcttgtctaccttttcagccattccctttgtcctggaatcgcggtaccctacacactgccccaggatttctccctcctgattaagcaatacgaaatccactccccatgtgtcaatccccatataagcaggtactttcctcagacgggcacactccttaagccctgctttaatttctgacagcagtttttccatatcccagtagaggcggtctccttcctgtctcattccattctggaatctgtacacctcttccagcattaatttaccggcctctttccatgcaattatcagccttccgctggatgccccgatatctactgccaggtaatatgtactcatacagatgttcctcctgttccgcaaggctgctctataattttgaaattgcttcctgctcaacggacagccctttcttaaatgtttctataaatttttcgaagccttctatgtcttttgcatctggctccattttcatgccttctttaccggcaaatactttataatccagataagactccaaagactcattgcctgccttctttaccgcataggccgcaagaacagcaatcccccatgcaccgccttctccagccgtctccataacggacaccggggcctgcatagctgctgccataattctctgtccgacccccggtgtcttaaacaagccgccgtgtcctaatatcttgtcaatctgaatcttttcttccttcacaagaatgtccatgccaatcttcagcgccccgagtgctgcatacagatgagtcctcataaaattagaaaggttaaacctgctgtcaggagtacggacgaacagtggccttccttcgtcaatcggtataatattctccccggaataatatccataggaaagaagtcctccacagtctgcatcgccttccagcgctttattatacagaacagagaatatctgattcatatcagccttaattcccatcgcctcagaatattcccggaacagcgatacccatgcattcaaatcggacgtgcagttattggcatgagccatcgccaccaggctaccgttcggcgtagtcaccatatctatttctgtatgtactctcgacagttctttttccaatacaatcattgcaaaaacagaagttcccgccgacacatttcccgtgcgctccgcgacactattagtggctatcattccagtccccgcatctccttctggcgggcataccgtaattcctgcctcaagctcaccggacgggtcaagaagttttgccccttcttccgtcagaactccggcatcctctcccgcagtcagcacctcaggcataatctggcgcaatttccacggatatcctttctctttaaccaattcatcaaatttctgaaccattccctcgtcaaaatcttttgctccgatattaatcgggaacattccagaagcatcaccgattcccagaactttccggcctgtcagctgccagtggatatatcctgacaaggtagtaaaatatcttacgtctttcacatggctttccccgtttaaaatcgcctggtacagatgtgcaatgctccatctctgcggaacattatattggaacaattctgttaattcacctgccgcctgtccggtaatcgtattcctccatgtacggaatggcacaagaaggctgcctgtctcatcaaatgccatatatccatgcatcatggcgctaaagcctattcctcctaatttcctaattcccgttccatatttttccttcacgccgcgcgccatatcctggtaacttcctttaagcccttcccagatatcttctaatgaataagtccagatatggttttccaacttgttctcccagtcataacttcccgtggcaaccgggacataattgtcatcaataaggaccgtcttaattctcgtagagccaagttcaatcccgacaactgccctgccttcttcaatcactttcttaactctttcagcatctacgcccacctgtcattcctccttttctacagcaatactgcaattaattattctgcccataataagcattcgcgccgtgcttccggtaataatgcttgtcctgcaattcctgcggggcaggcttattctgcggattaatcatctcacagcgggcggccatctttgcaacctcttccaatacgactgcattgtgcacagcctcatgggcgttcttcccccaggtaaacgggccatggttcttacacaaaactgccggagtggctacatagtccatgcctcgtttttcgtattcgtcagcaattaagattcctgtattcttctcgtatacctcatcaatctcctcttttgtcagatttctcacgcacggaacggagccgtacagataatctgcatgggtagttccatagcacggaatatcccttcctgcctgtgcccagcttgtagcccaggacgaatgggtatgtacaactcctccgatgtttggaaaacggttatataaaactgcatgagtgtctgtatcggaagaagggttatactccccttccactttctttccgtccaggcctaccactaccatagtttccggcgtaagcttattataatccactccgcttggcttaatgacaaacaaccctttctcccggtctatcccgcttacatttccccatgtaaatgtcacaaggccatatttgggaagaagcatgttcgcttcatacacttcctttttcagttcttctaacattacaaatgtctctcctttcatcttttttcttctatcataccagaaactgtcaaaaaggagtatcccctttatctatttatatgatgatgttggagtcaaatagcattcagaagcgcctccggccagaagttgattatcaatattataaacatttataaatatttttgatacttttcttccctctgccgaaagaaatagaagggctgaatatgagcattgaagaaatcagaacatatatggacaatcctaacccaacagattttattaaaattattgatacgaaatctgctgagatcaatcagcagataagaacactgaaacaaactcaaagactgccttctgacaagaaaaaacaaattcagtcatgcgagcaagaaaaggacgggcaatttcgtattattgaatgcgaagcagttaatctcccatatcaaagacacatgtggaatgaagcaatgctgtgccggaataggcagttatatttctgtccataaagttttaaatcatgatttcagccaatacgacggcatttttacacctttattaaatacaaaaaagtcaaaagacgtatttataaagccaaatggacaatatctctgcgcttatttcaaagacccctgggataaactccctgatatatacatttatttctccgggcaggaacccaaattcacagttcccttacatttcacgggaacagatttccaaaataaagtgtaggaaatcctctgtacaatcccatatggaaagaccatcacttatggcaaaatagcaaaaccggcggctgacaggaggagcctttcgcatatatcagcacaagccataggaggcgctgtcgggtataacggaatatctgttatcgtaccatgccaccgtgttgtaggtgcagacggcagcctgacaggctatgccgacggaattgataagaaaaggaaactactggctttagaaaaggcagatatattttacctcttcgaaaatttcctttattttctgaatctcctttatagaaataatcatagggatcatgatagaaatatttccaaacgaactggctctaagaagagcacggaactgggttttaaaaatccccggcctggtcaggcagattcggatggcatggtagccaagcgccggattttcttcctcatccagttcaaaatagcccgcctgcttatccgccccaagatccagccgttttgcttctttaacctgttcttcatcgggattgattattcgttcacctttatatccgtccataataaccatcttcccatgccactccttctgaataggaacggcaataattgcaggaatgcccatagtcctggcaagaatgtcgatctcagcaaacatggaagagaaactatttcccgtcacagccactgcatattctgcattcacctgctgctgcgttatcatattctcaacagaactacagtaatcctcgtcctccatcatcatctgatgtacttcaaaaatcgcggctcccgactcgcctacttctttaagcgccgtctcatacagttcctgcagctgcccttctgccttttccctggcttttattctgcaaatttttagaatcaaaatggaatcacagccgcattttccagttctgtatcctctacaataatttcaatgtacgctatcccattttaggcaaaaagaaaccgcaacccctgatttctcaaggattgcggaatataattagatttatatgattctaaattataaattactcgatgattgtagcaactcttcctgatcctacagtacgtccaccttcacggatagcgaaacgaagtccctgctccatagcaactgggtgaatcagttcgattgtcatctctacgttatctccaggcatgcacatctcaacgccttctggcaggttgcagacacctgtaacgtcggttgttctgaagtagaactgtggacggtagttgttgaagaatggagtatgacgtccaccttcatctttggtcagaacgtaaacctgagctgtaaacttgctgtggcatgttacagaacctggtttaacaagaacctgtcctctttcgatctctgttctctgaacaccacgaagcagagctccgatgttgtctccagcctgaccttcgtcaagaagcttacggaacatctcgatacctgttacaacagtctttcttgtctcttctttgataccaacgatttcaacttcatcgtttacatgaagaacacctcgctctactctacctgtagcaactgtaccacgtcctgtgatcgtgaatacgtcctctactggcatcaggaatggctggtctgtagcacgctgtggatctggaatgtaagaatctactgcatccatcagttccatgatcttgtcgccccattctcctgaaggatcttcaagagccttaagagcagaaccctggataatcggcgtatcatcgcctgggaactcatattcatcaagcagttcacgaatttccatctctactaattcaagaagttcctcatcgtctaccatatcgcatttgttcatgaatacaacgatgtaaggaacacctacctgacgagaaagcaggatatgctctcttgtctgagccataacaccatcggtagcagctacaacaaggatagcgccgtccatctgagcagcaccagtgatcatgttcttaacgtagtcagcatgtcctgggcagtcaacgtgtgcatagtgacgcttctctgtctcatactcaacgtgagctgtagagattgtgataccacgctccctctcttctggagccttgtcaatgttttcgaaatctacagcagcgttacctgcaactctttcggaaagagtctttgtgatagcagctgttaaagttgtcttgccgtggtcaacgtgaccgattgtaccaatattacaatgtggttttgttctttcaaatttagcttttgccattttgaatatcctccttaaatatagcgccttttcggcatttataattttttacgtttgctcggctatctctgattatatttcaaatctatttgtttttcaagcccttttaccatttaattaatcatttttaatggataatactttttcctgtacagatttcggaactggctcgtatttctcgaagaacatggagtaatttccacgtccctgtgttctggagcgcaggtctgtagagtatccgaacatctctgacagcggcacgtaagcacgtacaatctttccgccgcccaggtcatccataccttccacgcgaccacggcgagagttgatatcgccgataacatcgcccatatattcttccggcatcgttacctcaaccttcatgataggctcgagaagtactggagcggacttcttcatcgcatccttgaacgctaatgatccggcaatgtggaatgccatttcactggaatcgacttcatggtaagaaccatcgtatacgttagccttaagtccaactaccgggaatcctcccaggataccggacttcatagcctcttcgataccttcgcctactgccgggatgtattccttcggaatagctccgccgacaacagtagattcaaacttgtatgtctcttctccgttaacgtccattggctcgaacttaactttacagtgtccgtactgtccacgtccacctgactgttttgcgtacttgctgtccacgtcaacaggcttagtgaatgcttctttgtatgcaacctgaggagccccaacgttagcctctaccttgaattcacgcagaagtctgtctacgatgatctccaggtgaagttctcccataccggcgatgatagtctgtcctgtctcatgatctgtatgagcacggaatgtcgggtcttcttctgcaagttttgcaagagattctccaagttttccctgggatgcctttgtctttggctcgatagccagctcgataaccggctccgggaattccatggactctaagataaccggatgtctctcatcacagatggtatctcctgtagtcgtaaacttgaatccgatcgctgcggcaatatcgccagagtataccttctcaagttcttccctcttgttcgcatgcatctgaaggatacgtccaacacgttccttcttgccttttgtcgcattcagcacgtaagatcctgaattgatggatcctgaataaactctgaaatatgccagttttcctacgaatgggtctgtcataatcttgaatgccagagcagagaatggctcttcgtcagaagaatgtctcactacttcattgccatcctcatccacgccagtgatggcagggatgtctgtaggtgcaggcatgtattcaacgactgcatccagaagtttctgaacgcctttatttctatatgcggttccgcagcataccggaactgccgtacactcgcaagttgcttttctgagtactttcttcaagtcgtcaacagatggctcgtttccttccagatattccatcataagatcatcatcaagatcgcagatcttctctaccagttctgtgtggtaaagttctgcgtcatcctgcatgtcttccggaatatctacaacggagatgtcctcgcccttctcatcattgtagatgtaggctttcatctccatcaggtcgatgattcccttaaaatcatcttccttgccgattggcagctgaaggcagatcgcattctttccaagtcttgtcttaatctgttctacagcattgtagaaatctgcacccagaatgtccatcttgttgatgaatgccattcttggtacattgtatgtgtcagcctgacgccatacgttttctgactgcggctcaacgccgcccttagcacagaatacgcctacagcgccatccaatacacgaagtgaacgctcaacctctacagtgaagtcaacgtgtcccggggtatcaataatattgatacggtgctcaagagcgccttttttcggctttgtctgctcttccagcgtccagtggcatgtcgtagctgcagaagtgatcgtgatacctctttcctgttcctgctccatccagtccatagtagcagtaccctcatgagtatcaccaatcttatagttaacaccggtataatataagatacgttctgtcaatgtagtcttaccggcatcaatatgagccataataccgatatttcttgttctctctaatggatattctcttccagccaagattttttcctcctatattatacgcaattagaaacggtagtgggcaaatgccttgtttgcctctgccatcttgtgcatatcttctttcttctttacagatgcgcctgtgttgttggctgcatcaagaatctcattggccaatctttcttccatcgtcttctctcctcttttacgagaataggatgtaagccagcgaagcgctaaagcctgtcttctgtctgctctaacctcgattggtacctggtaggttgcaccaccgatacgtcttgcctttacctcaagtactggcatgatgttgttcatagcctcttcgaatacttcgattgccggcttgtcggattttgctgcaaccctgtcaaatgctccgtatacaatcttctgggctacgcccttcttgccatccagcatgatgttgttgacaagcttggtaaccactttgttattgtataacggatccgctaatacgtctcttttttgagtatgtcctttacgtggcacggttcttccctccttaaacatgtttgtgtaattgtaaatgttacactgattaattcatcggtactcacatgtgtctttctaatgatactgtgtagtgcacaggacattgatctatatccttgcaacttacttaatcatagttctgtttgtgactacattttcttaactaatgaacttatttcttagcgtcttttggtctcttagcaccgtatttagaacgtgcctgccttctcttggcaacacctgctgtgtcaagcgtacctctaacgatatggtatcttgtacctggaaggtcttttactcttcctccacggataagaacaacgctatgctcctgaaggttgtgtccctctcctggaatgtagcttgttacctcgataccgttagacagacgtactctggcgatctttctaagagctgagttcggcttcttcggcgttgcagtcttaactgctgtacatacgcctctcttctgaggagcggattcattcgtacttctctttcttaaagagttgtaccctttctgaagcgctggagcggtagacttctttacggatgtctgacgtcctttttttactaactggttaaatgttggcattctctttcacctcctacgattataataagttgctcattcattttaccatgaatatgggtgcacaaaaatacgatgcatcttcatgcacgctaaattagtgtattactattctttacggttgtcaagtggtttcttggcaatttccttctattttccgcggttttctgcattggaaggcctttatggccagacatgccaggataattcctgccgcaacccccgcgctgtctatcatcacatccctgatctgcccgctgcgccccggcacgaacaactgatggaattcatcgctggctgcataaaccgctcctattaaaaagcaggccggcagctggcgcttccatggtttcctaatatccaggatggcgcctgtaagcaggattccgaggatggcatactccgaggcatgggctgccttgcggacaggatagtcgatctttgccgcaaacgccgcctgcctttttcccggccactccttatattcttttatgactgccttgccaatcagcattcccacagatctgctcatctcctccgagtcttccgacaccttggctgaaaatgagaatatgacgatcatccacaggactgctgccgctgcaaatatttttcttcgcatagctaccttcttattataatcctaatacgtccgcaatcgctcccatctcttccagcgccacgtcaatcaagtcgtccaggcttaagccggtaaactcgatcgcttccatataatccctgtttgctcccgccgcgaatcttagttcattaaaacgtttcatcacggacttgtgcttcacgctggcaatcttcttatccggatagatctgcgctaccgctttgacgaacccgctcatggggtctgccgccaacaccgcgtactgaagggtggtcttcgccttcatgccgctctttgggttgtgggagcagatggcgtcaaagagaatcttgtcgtcaattccttctttcttaagtatctccacggatgtggggccgtggacgctcatgtcatgctgccagtcgcactgttcctcatccaggtcgtgcaggagccctacgattccccaatactccacatcatccggagcaagccttttggcgaggcctctcataatcgcctcaaccgcgtaggaatgggtgatgtagttctcgcccttcatgtatttcatcaatatctcatgtgcctgttctctgttcatcctaacttcctcctttaaacattctttcatatgtatgttattgtagcacacataattttgaatgtgaagttacagaaaatgcagaatttggcattgcttttccccgcttccttccgtataatctttagaggaattactgaaactatacctttacatgagaggaacctattatggaactaacaatacatacctttatcatcgtatgcccgcttgtcttcctggctggcatggtagatgccatcgcaggaggcggcgggctgatttcccttcccgcctatctgatcgccggattgccgccccatgcggctgttgccaccaataagatgtcgtccccatttggcaccgcgcttgccacctaccgcttcgcccgcaatcatctgatcaatgtaagactagccgtcccttccgtaatggcggcaatcatcggctccttcatcggctcccatgtctctttgatggtgccggaaaaggtcatggcctatgtgctggtggcggttcttcccttgtccgcgttcctggtattaaataagaagcttttcaatgacaaaggatccaacgaggttacccttaacaagcgcacctatctgaccgcgtccatagccgccttcgtcatcggctgctacgacggcttctacggccccggtaccggcaccttcctgatcatcgcgtttaccgtattcgccaggctaagcatcaagactgccaacgcgcaggcaaaggcgatcaatctcacgacgaatattacctccctgctcatcttcctgctcaatgggcaagtgattatctctctcggccttgccgccgcggcctgcaacatgctgggaggctatatcggagcaggcctggtcatgaagaacggcgcccggatcgccaagcccagcattctgttcgtgctggttcttttaggcttcaaagtggctggattctattaggatgattctccgcctttcctttcaagcagcgaaaaacggcagtaagaataccgccgatttccactgattcattattctattctgcctataatcggcaaatcttattccatttcccggttattttatatcatcaatcgtcttggtatggcagctgtgcacgcaaccgctgcagccacagctgcatccgcaggccccccctgcctttttcttcttccacatgcttcgtaggacgaatactacgattgcaagaatgattcctcccaggatagttgttgataatataccgctgattgctgctaatgccatatcattctccctctttctattatgccttcgcctttttggcgcgcacgcttgatatatttacatttagagtggcgctttccttatagggccgcaggagcagatatataaatcccgccaatataagaatcgctgccacagtgccaatcgtgaaaccgccgcctgtaaggaggctgccgaactggaatacgcataaggacaccgcataagccagaagcgtctgatatccgatcgcgaaccagaaccactttgcattgttcatctcccgcttgatcgcacccatggctgcaaagcaaggcgcgcacagaaggttgaacacgaggaacgagtacgccgctacagccgtcatgcttgaagcgagagttccccatacttcagccccatcttccgcgacttccgcgaatccatagaggatgccaaaggttcccaccacgttctcttttgccaccagcccggtgatagctgccactgccgatttccaatctccccagccaagcggcgcaaagatccacgcaatgcctcttccgatcatcgcaaggaagccgtcgcttaagtcttccaccatgccgaagcgtccatctgccaggccaaagttggaggtaaaccagatgaagatggtggacagtaggatgatggtccctgccttcttaatgaaggaccagccccgctcccacatgcttcttagcacgtttcccacagttggcatatggtaggccggaagttccatgacaaaaggcgccggctctcccgcgaacatcctggtcttcttcaggataattcccgagcagatgattgccgcgatccccacaaagtatgcgctaggggcaacccaggaggctccgccaaacagcgcgcccgcaataagggcaatgatcggaagcttggcgccgcacgggatgaacgtggtagtcatgatggtcatcttgcggtcccgatcgttctcaatcgttctggatgccatgatccccggcacgccgcaccctgtcccgatcagcatcgggatgaatgacttgccggacaggccgaacttgcggaagatccggtccataatgaaagcgactcttgccatatagccgcacgcttccagaaatgccaggaagataaacagcaccagcatctgcggaacgaatccaagcaccgcgcccacgcctgctacaattccgtcaagtatcaggctctgaagccatcccgcgcagttgacggcgtcaagggcgttgccaatgataacgggaattcccggaacatccattccaaacaggcggaacccatctccgaacagcccgtcattggcccagtctgtcgcccaggcgcctaccgttgagacagacacgtaatatacgatccacatcacagccgcgaatatcggaagcgcaagccaccggtttgtaacaattctatcaatcttatcagatgtcgtcaacttttctttccgcgactttacaaggctgtcccggattacagatgttatgtagttgtaacgctcgttcgtaatgatgctctctgcgtcgtcatcatactccttttccacggcggcaatgatatcttctacttctggaacatgtttaagctgctcctcaatcttgtcgtcccgttcaaacaatttgatcgcgtaaaaccgcttctgttcctccgggacttctgtcagcatcgtctcaatctcatccagggctgcctccacctcaggggcgaattcatgtaccggcgacgccgcgtcgttcatcctggcaagccgcgccgctttggacgaggcctctttgatgccttctcctttaagagcggatatggataccacttcgcagcctaatctttcagacagtatcttcgtgttgatctggtcgccgttttttttcaccacgtccatcatgttgatcgccatgactaccggtatgccaagttccatcagctgggtactcagatacagattgcgttccagattggttccgtccacgatattcaatatcgcgtcgggacgctggctgattaaatagtttctcgcaaccacttcttctaatgtatatggcgacagggaatagatgcccggcagatctgtcactgtgacatccttgtcgtcttttagtcttccttcctttttctccaccgttacccccggccagtttccgacaaactgattggatccggtgagcgcgttgaataacgtagtctttccactgttcgggttaccggcaagcgctatcttcactcccattttcattcctcctgtaatctctttactgtacttcgatcatctgagcatccgctttccttaaagaaagttcatacccccgcaccgtcacctctaccgggtctcccagaggcgctacctttctgacgaatacctgggttcccttagtaatgcccatatccatgattctgcgttttaccgctccttcgccgtgcagttttacgactgatacgctctggttgcatttaatgtctttcaatgtccgcatccttaccgcttcctcctatatcatgatcttattcgcaatccctttgctgactgcgactctggagtctttcacctggacaatgatgttcccctcattgcttgatacgactctcacttcctcgcctgttacaaaccccagattctcaaggaaccgctttacatcatcccgtcccttgatccgcttgatttcagccgtctctccagaattcagcattgtcagtggcatcatgatcactcctcatcatattgattttgattatcatttacattggtattatatgtcaattgagagccgttgtcaatagtgcattttataatcttgttggaatattcacggaaaagcaaggggaagaagcataaaaacgcttcttccccttgcttttgaggtaaatatattacgaaataaattttaagaaattgtcatgataaatcttcttaaggatctccgccgacaggcccagcccatgcatcaggcgttctttgccttccgtaaaataatagccgtcgggataaaggatatagtcccctttctcttccagaaagcgggttgtcaactcaagccttgaccggctttcttctattgataagggaatcggctcctcgtagatcaaagaccttgcgccgatgtccgttccaaagcagatccgattctggtactttgcgaaaaaggccttcgcttccttttcctggtcggaaaggttgaagtataactctattccaggcgttacatccgtatgtacattcggatactggtctaacatagcggccagccttcctaagtcttttgacaggaagaagaaatgcggaaacaggatgcgaagccgtggatgcctcttcaatacttcctgcaactgcctgtactgttcctgattatttacataggtttcgtcgtaaaaccatccggctttcctggcatattcggacactttgctctcatcccagaattcttccgggtcgttcacatgcatgtataccggaatctgtcgcttctccaacacgtcccaatattcctcccagatctcgtcgtcaaaatccggaacagggtattccttgcgtacgttgggctttccctccagcatcttgatgccatcgcagcccattgtcatgagacggtcgatctcgccgggaagcgcttccgccatccgccccggggacagggagaatatccttctgtccagccctccgaatatgtataccggtacgctgctttgtcgcttgaatgagaaagcatcctcttccaccggaatctttccgccttttggaatgcactgaagcgccacgccgcttaagccgtaagcctcaattatgtactggagcctctcggcctccaaactttctgcatagtgaatgtgtccatcaatcatcttagtattccacctctactggaaggcctgtatctgcggattcgtggatagcaatgatcgccagcgccgtctttctcgcgtcttccagcgtcacccggaactccctgccgtctaccagacggtccacgaaatcacggatgctttcataagacagtcccttgcagcggtcgaataccatattggatacaagtatatccggcacgcttgccttctcttctgtcacctcttcaatcagattgtggctggaaagatccaggctgatcatgccttccgtgcacatgacgctgcagcggaaatcattaatattgcggttgccgttgggcgtcacccacccgttttccatatgggccactccgcccttctcaaattcaatggtcgtcaaatagatgtccggggtatccacgcctaattcctttaatatgccttcttttttcacagaatacacccttttaacctcgtcgtcaaacagccatctgagggaatccaggctgtggcttcctaagaaccacaggatagaagatttggaggcccatgacagcatgtctgtggccacccactttacgtcgctgtgacggatataggcagtatatggcgtccccagcttgccggaggcgatttcctgctttgccgtattaaacgggggattccagcggttgtgcagatccaccatgcagcgcacctggtttctgttgaccgcctcgcagatccttgcgatatcttccttcgtggttgccagcggcttctcgatcagtatattcttttttgcgtctgccatggccaccgcgatatccgcatgggcaaagtcaggggtaacgatcgcaaccgcgtccacttcctcatccgccgccaggtcatggtagtccgtatatactttgcggatgccatatttgtcggctatggcccgcgctctttcttcattcatgtcgcagatggccaccggatccgcaaacagatgctccgcatagatggaggcatgtgtctcgccccaggttccggcacctacgatgcccattctaatctgtttcatttccatgattattcatcctcttttctttccattattgtttcactgctccggcagtcattccgcccaccagatgcttctgaagcgccaggaacaatatgactacaggtatcgtgatcagaaccgccccggccataagcgttccccagttggtagcgtactgcccctggaaactggcaattccgattggcagcgtccagttctcataactcttcataaatgtgcttgcaaacaggtactcattccatccagtgatgaaagagaacagccccgtggctaccagccccggaatggtaaggggcatgaccacggtagcgaagcaccggaatcttccggcaccgtctacctttgccgcctcctcaagggataccggtatggaatcgaagaaacccttcatcatccaggtacagaatggtacagagaatgtagcgtaagccatgaccagtcccatcctggtatccagaagctgcatgttgcccatgataatataaagcggtatgatcagcagcgatcccggaagcacctgggttgtcagtatgatgtaggaaagcgcgttcctgccccggaaccggaatcttgagattccgtagcctcccaaagcagcgattaccatggaaaacagcgtggtaagcaacgatacgatgacactgttcaccgtccactgcatgaagtcgaatgtggtggacttggtggtgagcatctctttatagccgttagccgtcggattcttcggtatgaaacttggcgtgctgctgtacacttcctgcgccggcttgaaggaggtggatatcatccatataaatggaaatagcgcaaatatgcatacgaggatcaccaggattaccgttattatttttctgccgtttttctttttcatgcctcatcctcccctcgattcacaaccttgaaatagaagaatgtaaataccagcgataccagcagcatgagcattcctgcggcagcggccttaccaaagtcaaagtacttaaatccggtctgctgcacatagatcgtcaacaattccgtcgcccttgacggcccgcccttggtcaatacataggcgatcgcatagtccttgatcgtccagatgatcagcagcaggaatacgatggtagatactgacttgatggatggaaccgtaatgtagcgtatcttctggaacgtggtcgccccgtcaatatctgccgcctcatacaggtctgaagagacgctttgcatgcccgccaggagcatgatcgccacgaaggggaatcccttccatatgttgacaaccattgctgctggcaaggcaaccgagacatcctgcagatatgcgatgttcttcgacaggattcccgcattgttcagcaggaaattaatgattccatagtcctggtcgtacatcagaatccagaccaggcatgctacgacttccggaacggcccatgggatgatgatcagcgccctggcaagtcctcttccaagaaatttggtattcaaaagcaatgccgttatgaatcccagtacatatcttcccagcacggtcaccacgatatagatcagcgttacctttacggaattgaagaaataatcatcccccagcactgcatgatagttctttaggcccacaaaataatttccggctgaggacggtttcgctatgtaataatactggaagctcatgatcgccgcctttacgatgggaacgatgagaaataccaggatgatcagaagcagcggtaccagaaaggcatagggctccattttctttttcatttttctctttttacttatgttcatctatggaccactccctgtgtagttttcttattcctgcctgctcattacttcctcgatctgcttctgcgcattatccatctcggtctgtacgtctgccgcctgctctgagaacatcttctgcgccgcatccagcattacctgggagatctctcctaactgggcaatgttcgggtctgcgatcagttctgcataattattctgcatgaagcctacgatggcatattccagctcgtgattcttgatgtactcgtcgctggtagagtaatcggtgttgcttgggatcattccacagtccgcgatcagcgcctgagcctcgtccgtagtcatccactccaggaatgcgtatgcttcatccggatgctcgcagttcttgctgatcatggttaccagcggatagttggtcggatttggcttataggtttctccctcatatgccacatcaaattgtggaatgattccgatatcatccatcagggactcatctctttccttggacattcccacgaaccatgggccatccatgttgaacggaacttcgccgttccagaacatctctctggaatccttcttatcggttaccagcttcgcagccttgtccttcagtatgaagtcctgccaccactgggctgcccatacgttttcaggcgcattgacattgacattatccgccgtatatggctctgactctccgttcgggaagtacagtccgccggataccggccttgcgatcagacggctccactcgcttacggtaaacgcgtgagttccggacacgacgcccatggcgtacttgccgtctttcgtgaactttgcgcatgccttacggaaatcttcctgtgtcttgatggactctggatcgattcctgcatcctcaagcatggatttgcggtagaagatgcctgtggttccccatgcataactggagatcgccagcgtttctccattcacgtcgcacatatcttgtcctaccagctttcccttcaattcatcgctcatgtagtctgacagatcgatgaatgtgccatcctccctgatggcatgataggtggagatgttctccggatatacctggatcatgtcgctttcgttgttcgccaggatctctgtcgtgatattgtcccaatatccgtcatatcctgcgcctaagatcttgatctcaacgtccgggtttttcttgttgtaagcctccagcaatgcatcgatcgccttctggtgtggctcctctacatacacggatgtggaaaatgtaagtttgatcttcccgtcgttcttggcctcccctttatcttcctttttgctgccgcatgcagataatcctgcaaccatagcaacgcacagcagcaccgagagtaaccgcattctttttttcataacctttcctcctcttttctaataggtttcctctgattaaaattatataaatttctacttttatataaaatgtaaattcctcagtttaagtgtgttattttatgagttttttacattttatctgataaatgcattttcccagcctcatcgtttgatattttcttaacatttccgcatatctattgcacatctctccctcaatcatgtatacttagacatgcgtaagcacacccgcctcgtagaggcatgcattacggaaaggaggagttttagtgtacaaagtaattataatcgatgatgagccttggacaattgtagatattgagcagacatttgcactagatgatatgggatttgagattattgactccttccgtacgccgcaaaaagcgctgcccgcaatcgtggcaaagaagccggatcttgtcattaccgacatccggatgccgggcatgacggggctggaactgatgcagaaggtcaggcagcagcatatcagctgcgaattcatcgtcgtcagcggatacagcgatttctcctacgccaaggaagcgattgcctatggagtcgccggatattgcctgaagcctctgaaccccgacgagacggccctgtgcctgaaaagagtccgggaatccctggataagcgcggcgctgtcccgggacttcctacctacattgacaataatttcgagaaaatattgaactatatgaacactcatttttcggaaaaaataaccttgaaatctttggccgcggagtttgatatgaatcccaattactgctgctccctattcgccaaatacttggacaagaccttctcccagcatttgacgcagctgcggataaacgaggcccagtctctccttaggaacagttcctattccctggagcaggtagcctccctggttggctatagcgactacttctacttcagcaaagtctttaaaaagcagtgcacctactcccccaaggaataccgcaaactattctcagccacaaaggagagcagccaatgaaaaaatccttatcaagccagtttgtcgccattcttctgatcccgctcatcctgatgctggcaaccaattactatattatcacagagatccgaagggatcagagccagagcctgaaacgctattgcagcactactctcgacaacatcgagatcaatattgcctctatggcaaccagcatgaagaagacctccaccatgttctcttccaagcaggagacccagtcctatcttcaaagcgcctccagggacacccatcagctgcagcgtcagtctttctctgacttgatcggcatgtcccaatcctacacgccggatcttgtggacatcatcgtatgggataagaattcgccaaccagcatgatcagctatattcccgccgacatggagaactttaccgtagagcgttttcgcaactctgccatgaacaagcagagttactttgagttctatatacagcctgccacccgcgagcctttcctgatgtatttcagccccgtttttatgaccacattttcggaggattttggaaaatatatcgggaacatcgcgatcatctgcaagacggagaccctgagcaagctggtgaactctaccttcgacatgcagctgcagatcaaggatgagacaagcaagagaatcttatattccaataattattccctgccagcgccggaagcatccaatccaaagatttacgaagagacgcttcgcattcccaataccaatttgtctgtggacggcacggtataccaaagccaggtcagcctcctcaatgacagcaggtctggcccccttatactgttcgcgctgctgtctctattctacctggcctatattgcctttgccgtgcaccacattataatcaggcctatccataaactgaatcaggaaattgaatccattgactatgagcatgacaagccgcagatacgcacttcgctcaagaatgagatcggctccatcgcctcccatgtaaatgcgctgctagagagggttttctctctcaaccagcacaatatagcctcccaggcaaggctgtatgagatggagctgagcaaaaagcagacgcagctctatgcctatcagagccagattaatccacatttcctctacaacatgctccagtgtatgagaggtatctccctgatgcacggaatccaggaggtcgcccagatctgcaccaacatggcagacctgttccgctattctattaagggggcatttctggtatacctggaagacgagctgagtattgtagacaaatatctctatatgatccgggtgcgttttcaggataagatcacttacagcctggagattgccgaggatacgaaaaagtgcaagatacccaagatgattctgcagccattggtggagaactccatcttccatggcctggaatccatcgaagataatggcttcatttatatacggaccttccgggagggagacggcctgttcattaccatccaggataatggcatcgggtttgacgaagccacattaaaggaactggaagaactgctgtcccaggatattcccagcgacatcaatgccaccttcaacgaagccaaaggcctcggcatcatcaatatccacaataagatccgcctatatgaagggacagaatatggaatcagcattctaagcaggccgtccgataccctggtcaccatccgcctgaatgccaggcagccagatgactcctgatattacaaaagcctccaggcagttccttaatccaactgcctggaggcataatatttccctatatagcccagcgccttatcctatccatcgttctcagttttatcttaacgtacaggtcttaattgttacatccagggccttctatcgtctttattcttctactgtttcgagttcttcttctacttctacttcctcaatgtcctcatcaagaacgatgtcgtcatccagggataactccgtatccagcttgatgtcacggtattttctcatgccggtaccagccggtatatgcttaccaatgatgacgttctctttcaggccaatcagcgggtcaaccttgcccttgatcgctgcttccgtaagaaccttggtggtctcctggaaggatgcggctgacaagaaggagttggttgccagagaggccttagtaataccaagcataatctgctctccagctgcgggctctttcccctctttttcaagttcattatttacatcttcgaagatcagcctgtcaacgttcgttcccggcaggaactctgtatctccggcttcctcgatacgaaccttcttcagcatctggcgcacgataacctcgatatgcttatcattgatctcaacaccttgcagacggtatacgcgctgtacttcctggatcatgtaatcctgtaccgcacgcagtcccttgatcttaaggatgtcatgcggattaacgctaccttcggtcaactcgtcgccggcttccagttccgcgccgtcctgaaccttgatcctggaaccataaggaatcagatatgccttagattcgcccgtctcatggttggttacgataatttcgcgcttcttcttcgtatcattaatattggccgttcccgcaaactctgtgataatcgcaagtcccttcggctttcttgcctcaaacaactcttcgacacgaggaagaccctgtgtgatgtcgtcaccggcaacgcctccggtatggaacgtacgcatggtcagctgggtacccggctctccgatagactgggcagcaatgatgccgacagcctctcccacctgtaccggctctccggtcgccatattggctccgtagcacttcgcgcagacgccgctgtgggatctgcaggtgaggatggtacggatcttgatcttggtcaatggctggcccttttcatccacgcccttcttcataatgagttccgcgcgcttcggcgtaaccatatggtttgccttcaccagaacgtttccatccttatcaacgatattctcgcacaggtagcgtcctgtaatacgctcctgcaggctttcaatctcttcatttccatccatgaacgcctttacatacattccaggaatttcggctcccttttctacgcagtctacttcatggatgatcagttcctgggatacgtcaaccagacgcctggtcaggtatccggaatcggctgtacgcagggccgtatctgacagacctttacgggctccgtgggcagacataaagtactccaatacgtcaagtccttcacggaagttagacttgatcggcaattcaatggtacgtcccgttgtatccgccatgagtccacgcattccggcaagctgcttgatctgcttatcagagccacgagctccggaatcggccatcataaagatgttgttatatttatcaagaccggacagcagcgcctcggtaagggcatcgtccgtcgctttccaggtctctacgacctccttataacgctcttcctccgtaatcaggccacgcttaaagttcttcgtaatcttatccaccgtatcctgcgcctgctggatcatctccggcttctgcggaggcacggtcatatcggaaatagatacggtcatggctgctcttgtagaatacttgtatccaatggcctttaccgcatccagcacttctgccgtcgctgtagagccatgggtattgataactttttcaaggatctgctttaactgtttcttgcctacatggaaatcgacttccagaagaagcttgttctcttctacttcacggtctacaaatccaagatcctgcggaatgatctcattaaaaatgaatcttcccagcgtagactcgatggttcctgacacttcttctccgtccggcataacctttgatacgcgcaccttaatgcgtgaatgcagggtgatcgcctcgttctcataagcaaggattgcttcattcacactcttgaatgcttttccttctccctttgcgccaggcctttcctgcgtcagataatagattccaagcaccatatcctgtgaaggaacggcaaccggtccgccgtctgacggcttcagaaggttgttcggtgacagaagcaagaagcggcactctgcctgagcctctacggaaagcggaagatggaccgccatctggtctccgtcaaagtcggcattgtaggccgtacataccaatggatgcagcttgatagccttgccttctaccaggatcggctcaaatgcctggattcccagcctgtggagcgtaggggcacggttcagcataaccggatgctccttgatcacgtcttccagaacatcccatacttccggctggagtctctctaccatcttcttggcattcttaatattgtgggcggttccattctgaaccagttctttcataacgaatggcttaaacagctcgatcgccatctcttttggaagcccgcactggtagatcttaagttccggccctacgacgataacggaacgtccggaatagtcaacacgctttccaagcaggttctgacggaaacgtccggacttccctttcagcatatctgacagtgacttaagcgcccggttgccaggtccggtaaccggacggccgcggcggccgttgtcgatcagcgcgtccaccgcctcctgcagcattctcttctcgtttcttacgataatgtccggagcgcctaattccagcaggcgtttcagacgattgttcctgttgatgatccttctatacaggtcattcaagtcagacgtcgcgaaacgtccgccgtcaagctgtaccattggacgcagatccggcggaattaccgggattgccgtcatgatcatccattcaggcttgttgcctgactcgcggaaggcttccacgacttccagacgcttcacgattctcgcgcgcttctgtccggtcgctcctttaagcccttcctgcaattctgtatattctttatccaggtcgatggattccagaagttccttaatggactcggcacccattcctacacggaaagaactgccccatgcttctctggcctcctggtattcctgctcggataacacctgcttatactgaaggtctgtcttgcccttatccaatacgatataggacgcgaaatacaataccttctccaaggttctcggagaaagatccaggatcagtcccatacggcttggaattcccttgaagtaccagatatgcgataccggagccgcaagagcaatatgccccatacgctcacgtctcacgcttgcttttgtgacttcaacgccgcagcggtcgcagactacgcctttatagcgtatcttcttatactttccgcaatggcactcccagtctttgctaggcccgaatatcttctcgcagaataatccgtccttttccggcttcagggttctatagttaatcgtctcaggcttcgtgacttctcctctggaccactccagaatcttctcaggtgatgccaaaccgatcttgatcgcatcaaaagtcattggctgatatgattgttccttattgttttctggcatactggcaccccttcctattcttcatctgacaaatcatctaattcaaaattatcatcatcagtttcttcaaactcaatctcgaagtcgtcctcttccggctcttcttccacatccacaagttcttccccctggaattcctgttccgtgtagccttttgcccccaggtcgtcttcctgatgatattttctgtctccctctatcagcgagcgaaaatctgtctctcccatgtcgacagtctccatgatctctacttccgtattatcatctctgagcacgcgcacatccagtcccaatgactgcagttccttcaacagtaccttgaaggattccgggattcccggctccggtatattctcgcccttgatgatagcttcataagtctttacacgtccgatgacgtcgtcagacttcacagtcaggatctcctgcagcgtgtaggatgctccatacgcctccagagcccaaacttccatctctccgaaacgctgtccgccaaactgggcctttcctcctaacggctgctgcgttaccagagaatatggtcctgtggaacgcgcgtgaatcttatcatcaaccagatgatgcagtttcaggtagtgcatgtgtccgatggtaaccgggctgtcgaaatactcgccggtacgtccatcgcgcagacgaaccttgccgtctctggatatcggaacgcccttccacagttttctgtgctctctattgtcagacagatactgaagcacttccggaagcagttcttccttatgttttgcctcaaactcttcccagcttaagttgacataatcatttgcaaggtcaagcgtatccataatatcattctcatccgccccgtcaaatacaggcgtggcaatgttgaatcctaatgctttggcagccagtgacagatggatctccaatacctgcccgatattcatacgggaaggcacgccaagagggttcagcacgatatctaacggacgtccgttcggcaggaacggcatatcctcaaccggaagcacacgggatactacacccttgttaccgtgacgtcctgccattttatcgccgacagagatctttctcttctgggcgatatagattcgtactgcctggttcactcccggagacagttcatctccattatctctcgtaaatacctttgcatctacgacaataccatactctccatggggcaccttcagggatgtatcccttacttcgcgcgccttctcgccgaagattgcgcgaagcagcctctcttctgcagtcagttcggtctctcccttaggagttacctttcctaccaggatatcgccggcacgcacctctgcgccgatacggatgattcctctctcatccaggttcttaagggcatcatcgcccactcccggaatatcgcgggtaatctcttctggtcccagcttggtatcacgggcctctgcctcatattcctcgatatgcacggaagtatagacatcttcctgcaccagtctctcgcttaacaggacggcatcctcataattgtagccctcccaagtcatgaagccgatcagcgggttctttccaagagccatctctccattggaagtagacggaccgtctgcgatcacgtcccctgcctcaacccggtcgcctttgaatacgatcggcctctggttgtagcagttgctctggttgcttcgaaggaacttgatcaacttatatctcttcagattgccgtcatcctgacggatcgtaatctcggtggacgtagagcgctctactacgccgccagtttccgcgatcacgcatacgccggaatcaaccgcagacttttcttccataccggtccccactacaggagcctccgtcataagaagcggcactgcctgacgctgcatgttggatcccatcagcgcacggttggcatcgtcattttccaggaaaggaatcagcgccgtagccactgagaataccatcttcggagaaacgtccatatagtcgaacattcttctctcatattcctgggtctcatcacggtagcggccagatacgttcttatggataaaatgtccttccgcatccagaggctcgttggcctgtgccacgtggtaattgtcttcctcatcggcagtcatgtatacgacttcttctgtaactacaggattggccggatcgtcatggttgatcttgcggtatggcgcctcaataaagccatactggttaatccttgcataggtggcaagggagttgataagaccgatgttcgggccttcaggcgtctcgatcgggcacattcttccataatgagaataatgtacgtcacgcacctcgaatccggcccggtctcttgacagaccgccaggacccagggcagacagacgtctcttatgggtcaactcgccaagcgggttattctgatccatgaactgtgacagctgggaagagccgaagaactcttttacagcagccgtcacaggcttgatgttgatcagcgactgcggagagatgccttccagatcctgggtcgtcatcctctcccgtaccactctttccagtctggaaagaccgattctgtactgattctgtaataattctcctacggagcgaatacgtctgttaccaaggtggtcgatatcgtcatcattgccaagcccatattccagatgaatattatagttaatggacgccaggatatcctctttcgtaatatgcttaggaatcaggtcatggatgtctctcttgatcgcatcctttaattcgtcaatatcgccggcagtctcttccaggatgccagcaagaaccgggtagtataccaactcggtaacccctacttccttcgggtcaacgtctacaatggaggtaatgtcaaccatcatattggaaaggactttgatatttctctcttcatcctctctttcaatccacacatatggaactgccgcgttctggatctggtctgccagttccctggtcaccttcgtgccagcctcggcaatcacctctcctgtcagagggcttgcaacgtcttgtgcaaggatctggcctgtaatacggttcttaagcgccagtttcttattaaatttatatcttcctactttcgcgaggtcataacgtctaggatcgaagaacatgctggtaatcaggctctctgcactgtctaccgccaaaggctcgcccgggcggatcttcttatagagttccagaagaccttcctgataattggttgcggcatccttctcaaaacttgcgataatcttcggctcttcgccaaaaagttccacaatctccggattcgtgccaaatcccatagcacggatcaatacagtaatcggcaccttccttgttctatctacacgtacataaaaaacgtcattggaatccgtctcatattccagccatgctccccggttcggaatcacagtcgatgaatacagtttcttacctaccttatcatgcgcgatcgcatagtaaatgcccggcgaacgaaccaattggcttacgattacacgctctgccccgttaattacgaaagtaccggtgctggtcatcagtggcaggtcgcccatgaatatttcatgctcattgatttcgtctgtttctttgttgtgaagtcttactcttaccttaagtggcgcagcgtaagtcgcatcacgttctttacactcttcaatcgtgtacttcacgtcatcctcgcacaaagtaaaatcaacaaattccaggcttaagtgaccactgtagtcagcaatcggggaaatatcatcaaatacttcttttaacccctcatccagaaaccactggtaagagtccttctggacctcaatcaggttcggcatctgaagaacttctttttgtctggaataactcatgcgtgaactttttccgcttttgatgggacgaattctgtttttctccatattgacgtttcactcctcatatattttttggttgggctacgagatgcccataacaaattgcctaaatcaccggaaacagcccctaagagccgatcccctgcgatatcatggcataagtttccacaatagcgcattttttactatatcacatagaattcgagcttgtcaacagctaatataaatttcccttcctttcataagagttttgccacgaacgcctaaattaaatcattccgttatggccgcaacaattatattaatatggaagaaatagacttcagatccttcgaatatctatattaatctagaagcgaaatccatttagacttggcaccggcacgatcccattcttgcacggctcatgcgttccaagagatgcctcttcctgctctcttgcaagttctggattgtccggctctcctctcttcctttgcggtgtcccggatatatccagctggcagccttcttcttgcgccgcttccttcccttccgcctccagcagttgggaatacctctccgtactcattaccaccatagagccgtatccattcttcgtcagatggaccacttctcctttcttcaccatcttttcaatctccgtaaatttattcctcaaatccgatatgggcctaatgttgatcatagaaatccctcctttgctttttcttattttatcataattatgataaaatttccacagcaataaatcaacatctatgcgattgacttacacgctccgcctttcgcttgattttatccgccttctttttttcatgccatgaataatttttccgacactgtttagactaatctcgtctatttactactatttttgtaactatttggttgcatattcaaatacggcagacttccttctagtaacatatttaggaggtggatatcatcatgaaatttcaacggatagaagatttgagaattgaccatgacctgacccagaatgacatagctaagatcctgtcctgccagcgcgaagtatatcgccgctacgagaaagggtcccgccagatacctgttgattacttgataaaactggcaaattattacggatgcagcaccgattatattctcgggctgacagaccgcaagacaccatatcctaaatagaggtaggctgccatgcctgccggtttagcaccagcggcacagcagcctttttcagccttctgtcaattccttataattgcaataattatgctctctttttacgctttattatagccagtatcacggcatccgcctcatcgagggcggctttgtatcgcttacgattatgatattgctggaaatcaccttttcgtcagcacggtggataccgctgccttccagccattgtatttcttcttgcgcgtttcgccgtccattccaggagcgtactttacccggttcagcctgccaaagatggactcatcccacacgccaagagccaggcctgcggcataggcaggaccgattccggataattcctcgctatctggcacctgaaccgccacgtccgcgatgtcgctttggaactgcatcagatattcattcttcgtggggccgccatccacgcgcagttctcccaggcgcacccctgcatcctcgcacatggcttttacgatatccgtgatctggtaggcgatgcactccacgcctgcccggaccacttccgccttccccgtagttctggtcatccccacgatggccgccgttgcccggctgtcccagtagggggctccaaggcccgagaatgccggtatcagatacaattcgtcatcctggaccgcttctcttgccaaagttcccgtctctcccggagaccggatcagcttcaggtcatccttaagccaggtgataaccgcgcccgtatagttcaggttgccttccagcacatagttcacttttccgcccatgctccacgccagggaagttaccactccgtgggtgctgagcaccggcttctctccgatattcatcataatggacgagcccgtcccgtaggtggacttcgtcatgcccggcttaaggcatccctggccaaacaaagaaccatgggaatcccctagcacgccgtggattggcaccttcttcggaagcacaccttcgaagtccgtctttccaaactcagaatccgaatcgcacacctgagccatattggaaggatcaatgccgaacaaggcacagatttcctcgtcccacttcagttcgaatatgttaaaaagctgggtcctggacgcattggaataatccgtcttataagactttccgccggtcagtttgtagaccagccaactgtcaatcgtcccgtggcagatttctccccgatcggctttctctctggcgccctccacgttttccagtagccaggcgatcttagaggccggaaaatacggagacagattcatgcccgtcttcctgcggatgttctccgcctccccctgcttctccacgcgctcgcagatattcgctgccctggcgcactgccatacgatggcctccgccaggggttctcccgtaatccggtcccaggcaagggacgtctccctctggttgctgatgccaacgcctgcgaccttagatctgtcaatatcttccgtcagtcgggataccacatcgattacattctcatagatctcggccgggttatgggacacccagcctttttcattgacgatctgctcgtgaggcttatccgtcctcttaatcaggcttccgccctcatcgaacagcagcgccttcgtaccctgggtactctggtcgatgctgatcatatatttctctgccatactctcactccctctttattaagaagcagcctacaaccggacatttagcacctcatcccttagcggaatggaggcagtcgccccctggcgggacaccgcgatcgcggatgcctttgccgccagagccaggccatcctgtaccggcattttgtcgatcaccgacgaaataaagtatccggtaaatgtatcccctgccgcagtcgtatctactgcctttactttatagattccctggcggtattgctcctctttatactgataaacagagccttcgccgccaagggtcagaaccacttttgcctccggatagatctcctttaatctttccaggatcctatccgtctgcgtctctcctgtgacctgcccgccttcgatttcgttcagcaggaacatggatatctttccaaagtcgcaagcctccagagcgtcgtcataaggtgatggattcagaatgatcatcatttctttttcatatgcgcagtctatgatatagtccagcatattaatctcattctggagaagcagaatatctcctttctcaaaatgagccagtacctcatccacatactctttcgtaatgcttcggttcgctccgccatataggagaatgcaattctgcccattcttatccacctggatgatcgtgtggccggatttgcccggtatgctcttaataaagtctgcattgactccgccttccttacaggccttaagcaggatgcctccttcttcccctatcattccggcgtgatagacgtcaactccggcctttgcaagggcaatggactggttcagtcccttgcctccgcagaagatgttcattcccgaagacgccagcgtctctcctggcgccaccatatggtcaaccgaatacacataatccagattcaatgatccaaaattcaatactttcataccgtaattcctcctgaattccccgtccgggcacacttttctctcgtcttactgtacctatgccgggaaagcaacgccggcccttaagataatatttggataaggcgtgaattctccagtacggattgcgaacttgagattcttagacctgtcctttaattccaagtggctgatcatctccgactccacgcccggcagtttctcttttatataagcaagaagttccggattcttctccgcgatctcctccgccagcgtatagaattccacctccgtctcgtctagcaccgcatccattacctgcccaaaggacggaactcctccgcacagagccagatccacaatctcgacccctttcgggattggcatgcccccgtccgcgatcataaatgtatccttatggcccagccctgcaataagtccggaaagctgcgcattgatgatacctcttttcttcatacgatccacctgcctttttatagaaggacaggtcttttgacctgccctaattctttttgcttctattatttgcggcctttctggccgattatttattttcattgcgtgcctggagagccatcttagcctgcaggtttctctgtacctgatcaatgattacggcaatgatgatcacaaggcccctgatgatcttctgccagaactcggttacgccgcacatggtcatgccatcgttgatgacgccgattacgaatgcgccgacgatcgttccgccaatggttcccacgccgcctgccatggaagtcccgccaaggacagatgccgcgatggcattcatttcccatgactctcctgtcttaggcgtagcggaaaccaactgggaggtggcgataatgcctacaatggcggagcagaaaccagagaatgcatagacccatatcttcaccttgtctaccttgatacccgacaatttagacgccctctcgttaccgccgatggacagtacatgccagccaaacggagtcttcttcaagataagtccggcaatcaccgcaataatcgcaagaatcagcacgccgcatggaatcgaagttcctccaaggttacggccgaagatctcgaatcctgtattgcccagcccctcagagccggacagttcagaaaacgtcgcaccgttggaacggatattggcgaatcctctccagatatacatggtgcccagggtggcaatgaacggcgctacgttgaactttgtaataacgatgccattgatcatgcccatcagcgctcccagaagaacggtgatcaggacgatcatcggaacactgaagtataaagtcacgccgaacatcttaagcgtaagtccctgctggatgaggccgcctgcgatcatgcctgcgaggcctgccacagagcctacggaaagatcgatgcctccggtaatgatgacataggtcatgccgatcgcaaggatgccatacagcgccacgtgcttggccacagtaagcagcgcgcccgcacttaagaaattatctgccgtaatgctaaagaaaataagcagaacaattaatacgataaatgtacgacctttcaagagggtcatcgctaatttattatttcctgatttttgtttcgctgccataatctaactctccttttcctctatatgatggcccttgtaagaagccagtaccaatgtatcctgctgaatctcgttgccgaagaattcgcccgtcttgataccatttgacaatacgataacccggtctgcgatggatacgatttcctgcaattcggaagaaatcacaatgattgacaatccttcttccgcatatttattgatgatatcaaacacctcggtcttagcgccgatatcgataccgcggcttggctcatccattagcagaatcttaggctccgtcaggattccctttccgatgactactttctgctggttaccacctgacaaggaaagaatcggcagtttcttgtctgccactttgatctgtatatccttaatttcctgatctactttctcggcctctttcttgctgtcaaggaagggccccttcttgtatctcttaagcgcggacagcgcgcagttcttctcaatatccagagtctgtaccagcccctgcatctgcctgtcttccgggatcagcgcgaagccgctgtcaatctgctgggagatggacttgatatgaagttctgtcccttccatgatgatctgtccggtatgctccgggtgcaggcccatcaggcattcgaacacttcgcttcgcccggctcccataagtccatagattccaagcacttcgcctttcttcagttcgaagttcaggtgatccaccaggtagccgccgcccgcctttggaaggcataaatctttcacttccaggacattttccaccttgctccagtctacttcccgatcccgcttcggataagacttggctccgccggtcatctgatgcacgatccatggcacgtcaatatccttgacatccgcgtcagccacatacttgccatcccgaaggatcgtcacgtgatcgccgatctccatgatctcttcgagcctgtgggaaatatatacgatggagattccggctgcggtaagctctctcataatcttgaagaggaccttgacttcctgctggctcagagacgaggtcggctcatccatgatcagcaccttcaggtcatcctccaccagatttctggcaatctcgatcatctgctgctgtccgactctaagttctcccaccttcgcattcaggtcaagcggatgctccagcctctcaaggaccttgctggctccatccatatgtaccttgttatccaggacaaccttgcccttggttttctctttgttcatatagatgttctggtatacattcaggtttgggaacaggctcagttcctggtggatgatgccgattccgttcttccttgcctctgtcgtattcttgaagaatacttccttatccccgatatacatcttgccttcattcggctgttcgattccggcaatcatcttcatcagggtggatttgccggcgccattctctccgatcagcacgttaaccttccctcttagcaggtcaaaagatacttcgtcaagagcctttgtacctggatagatcttgcttatcttttctgcatggagaaatacatcatccctgcatttatatgtttcgcccatagtctatatctccttctttgcttggcaatccgttactttgcttccagtaccacaggcgtaatcagcacatccgaacttccgctggataccgtaaatgctcctacaaatgaaatcgtctttccctgcagggattccggcttcgccggcccaacaacatccttggctacgatctcgttaatactctgggataccgctgcccactgttcctgattcttgtaatctccaaatttgataaagccaagcgtgtctcggatggatgatcctttgtataccggtccgatctggatcttgacggattccgtcccgttatatccctccagtttgacggacatgtatcctgcctgggactgagtattgacttcttccacggttccggtgccttttaccgcataactgagttctccggacttgcccatggaataacttccatattcttctgccagagcggtcagatctccattggactgttccaggaattcttttaagtctacagcctttgcattgagttccggcagcgccgattcttcccatatggctgcaacgtcgtccccagcgttaaattcgacatctccggtatattttccttcttctccgatcttgattacctttacgattccgcatccggtaaggagtgtggatgctgcaagtgtaaatgcaagtgcgagtgctaacatacgctttttcatagcgtcctccttcatattctttattcgagaaacatcccatccgggatgtctatgttcatcttcatttaatacttttacataaaagagtcgtttttttatacagggaagcgttttttgcgcctccctgctccctgcattgtgtcattgcaaattattccgtgtaaacaaatcctgctaacttgtctacgttctctgacgtaatcgcgatacagtcaaccagctgtttttcatctacgccagtagatccttctttgaggtactggtcagcctgctctactgccatctcagcgatgaccgcgaactgctgaagcgctgttccggtagcatctccggatttgatcagggctgctgcctcgtcggaaccatcaacgccgataaccggaagtttcttgcctgctgcctgaagtgccgcgcacacgccctctaacatggtgtcattgccgcagataacgccttcgatgtccgggttagcctgaagcatagcttccatcttgtcataagcttccgtcttttcccagtttgccgtctgctgcgcaaccatttccatatccggatactggtcgatcacctcatggaaagcagaagaacgtacgcctgcgttggtatcagactcttttcctaacagttctacatattttcctttttcacccatagcttctacgaacttctcagcgatagcctttgctccctggtagttatttgctacgatctgggaaatagcaacgccttcttcattgatctcacggtcaatcaggaatgtcgggatccctgcttcccttgccttcttaaccgcctctaccgtagcatccgcgcctgcattgtcacagatgatggctgctgccttgtcggcaatcgcgctgtcgaacaactcggtctgcttggtcgggtcatcatcgtgggatactgcttttacttcatatccaaattcttctgctttcgcggaagcggtatcaacctctgccttgaaagccggattagatacagaaggagtgatgatgtacatgatgttagagccgccgccctttaacgcttcgtcattcttcttgtcctctgccttatcctctgtcttcttgtcctctgcctttttgtcatctcctttggagccgcatccgactgccatcgctccaaccattgctactgtaagcaacacggccaatacttttttgaaacctttcatttttccgttcctccttatgtttttaaaagtattaaatttctatattaacaggtaggccctgccaatatcatttatttcaatgcttcggccgccctctgggcaatcccttcggcatttagcccgtaatagtcaaatacttctctggatgagccggtaatcaccggttcgtccggaagagacatgttgattaccttccttgggcattcgcttcctaccacctggcttaccatggagcccaggccgccgaacggcgcatgctcttctacggtgaccactgcctttgccccggatgccgtctcgacgatggtctctttgtccagaggcttgatgcagtacatatctacaaccgccgcgctgatcccctgttccttaagaagtgccgccgcttccaccgcaggctttaccatctctccgcaggcaatgatggctacgtccgttccttccgtcactaccgttgccttatccattgtaaacggaacgctgccttcctcatagatgtcatccacggcgtttcttccaacccggatatatgccggcttatcatctccaagcaatttcttgaccaggcactccgtctggagtctgtcgcttggaagatacactctcatattcggcactgccgccattgccgcgatatcctgggcggaatggtggctcattcccagcgccccatagcttacgccgccgctgatcccgatcagctttacattcgtattggaataggctacatcaactttgcactgctcgtaacttctggttgacaggaagcatgccggagataccgcataagacttcttgccgcatttggccaggccagcggagatgctcaccagattctgctctgcgattcccgtctccacgaactgctttggatacgcactggcaaacggggcgaaggatgcgcttcctcttgagtcgctgcaaagcgctacaatgtcctgatccgttttcgccgcctccatcaacacttcacatattacctgtttatttgctatcctacccacgaagcgccgcctcctttctatccgcgagatcttttctgatctgcgccagttcctctccacttggaactttgtggtgccagtttgctttgtcctccattacggaagaacccttccctttcaccgtattggcaatgagcacggaaggcctgccctttaccgtctttgccgtattgaacgcttcctttagctggtctatgtcattgccatcttctacatcgatgacattccagccaaatgccttgaatctctcatgaaggtcatcatgggccatcacgtcctcagtccgtccggatatctgcaagcggtttctgtcgactaccgcgcacaggttgtcaagcttgtagtggcttgccgccatggcgccttcccatacggagccttcagccagctcgccgtcgcccattaccgtgtagactctgtagtccctgtcatccatctttccggcaagcgccattcccacgctgaccggaaggccatgtcccagggagccggagttcatctcaattcccggaagcttattgttgggatgtccgatgaacttggagccgaatttgctgaacttggcgatcacatccttgatatcaaagaatccctttgctgccagcactgcataatacgcttccacggaatgccccttgctcatgatgaacttgtcgcggtccgggtcatccgcgttcagcgggcttatattcatctggtcaaaataaatctctgtcagtatctccatgacgctcatgtctccgccgatatgtccggccttcccttccacaatcatgtcgattacattttctcttaattcgtaagcgagtgctttcaaattttccataatcattctcctcttagatatgcttttacatcttcttcaatcgggtcatacaggtccggctttacgccgatatatttgcatgcctcatacaggacaggaaccacgtccttgtggattcccacgcagtgatgaatgtatgggccttccacgatcttggcctccaggcgcttgatattgtcaacttccacccagagataggttcccatgcctttcggtccgtctacccctctggcattgccaaggagcagagagtattccccgttgtccccgtcgaatctgcacagggtcacgtctccgtgcttcgcctctgccgtaaggctgcccggatggtcgaaagccagcggataggtaagtttcggcttttctagtgcaacggatatcggccatgggccgcagtgctgcagcagttctccattctcgatatccggatggcggatagtccagtctgcgaagaagcctctcttctcacccattcctgccgcctctaccagtagcgcggtaatggctccgtgaatatccgtctcgcatacgaccgggattcccttctcattgaggatcgcgttagccgcgcaaggcatgatgccaagttccgtctggagagcattccagcactggatcgctcccgccttgcagccatacctgtcgatcaactgttccatggcaaccgcaagggcagccacattctccacttcgttgtccttgatctttacttccatgttctcacggatgtacgcgatcatttccgcgactttatcgccctcttccttgaccgccttgacttcctccgtaagttccgtcatcggaatcggggaaagctggatattgaacttctccagaagctcgccttcattacacatcgtggtccagaagtcaaacggcctggtcgagatctgaaggattcggatattgcggaatgtcttcaccacgttgcacaccgcctggaaatctcttacccctctttcaaataccgggtcatttaacctgcagtttgtcatatatgtaaatggtatctggaatctccttaatactttcccggttgcaaacagtccgcactgcgtgtctctgagcctcgcaccgttctcatccggcctctcgtccagcggcccccacagaagaaccggcacattcagttctttcgcaagccttgcgcagacatattccgtaccaaaattgcagtgtgcaaggaacagtccgtcaatgcccgcctctttgaacttcgccgcaatcttcttgacgtcattgtcgtcataaagaagtccttcttcattgatatcatcaatatcaacaaagtcaattccaagctctctcagcctgtctgccgtcaatcctctgtacttgatcgcgtccggcgcgctgaagatgcttctccttgtgggtgcataccctaatttgatagttgccattttacttcctccatcctttcttgccccttggcttcctctatatctaagttcctgacacttcctcttacaagaaaatctgtgccaacctgtatcttcatctttacttgccttctggaataccggatatggtccagagcccttcttaccgccacctcgcccatctcctgcttgtgtacatggatcgttgtaagccccggggtggagacggagccaaaacggatatcgtcgaatcctacgatggacacctgattcggtatcttgattcctttttcttccagggctctcatagccccaagcgcgatcacgtcattatccgcgaagtacgctgtcggcaatgctggcgcttcttccaggtaggctttcatgccttcgtatgccgtctccagcgtcgtccccagcgtgaccacgtattccggtgcctctgccaggccatgccttccaagcgtgcggtaatatccatattccctgtactggaaagccttgatccggtaatccccccgcagatatccaattctgcgatgtccattttctatcagatattccaccgcgttgcaggctgcatccgtattgttgatcagcactccgtcaaaagccatctcctcgcaccatccatccagcacgatcatatatcctttgtagtccataaagggctgatagtcttcttccatcatctccgtacccaggagtatcatcagcgaattggtgtcttcaagcacttccttaagcctctcctgaaacgcgtcatcttcataattcagatggctgaaggccgtctcataacccagttccttcgcctgccgctcaacaccttctatcatggcaggaaatatcaggctgtcatctatgatgcgtccattcttcctgtaggtcacgaatttaatctttgttatggtcttttccgtctggtatcccagttcctctgctactttgaatatctttcttgaagtttcttcattcacgcccttcttgcgattcaaagcattggagacagtcgcctgagaaaagcccgtcatctggcttatctgttttatactgaccttcactttttcaccgcccctaactctttatgcccttattataaatatttatataaatatttcaatagttttataataaataattttgtttcatttacattttgtttaattacaatagttttacaccgtgttttttggttattatttacatctaatacgctctacatttacaatttgttcacatttattcattgttttagttaaatatttatgtaaatatttatataaacatttaactaaataagtataaaaaggcgcaaaaaagaagcgccctttcttttggcgcttccaactcgtcccgcacaaggccagaccgttcaatattatatttttcttacgcttcctctttccacaaaatccgtacagacttgtatcttcatcctcactttcttgggatcctcgatcgccagtaccaattccctcacggcggtctcccccatctcccgcttatagacgttgatcgtcgtaagcggcgggtccgagatagccccgaaggaaatattgtcaaaccctatgatagacacgtcctcaggtattccgtatccatactccttaatcgcccgcatcgcgcctatagctatcgtatcattatccgcaaaatatgccgtcggtatcaccggcgtctcatccagataccgcttcattccttcataggcagtctcaatccgggtacccaccgtcgcaatatattccggccttacgggaagcccatacctttccataacccttttgaaaccaatctctctgtaccggaatgcctggatcctgaagtctccctggatatatccaatgtccttatgccccttgccagccagatattccaccgcctttgcagccgaatccgtgttgcttatcagcacgctgtcaaaaaagtaccggtcgctccacccgtccagtaggataattttattcttggcttgagtaaacggttcgaaatcttcctccagcatctccgttcccagaagaaccacggcgctctccgtatccgagagaatctcattgatctgcatctggtactgggcgtcattgatatccacatgacagaacaccgtctcgtatcccatgctcttcgcctgatgctctacgccttcgatcactgccggatggaaggggctgtcatcaataatcagcccgctcctccgaaaaatgacgaaccggatcttcttaatcttctcctccatccggtaccccagttcttccgctaccctgaatattttctccgacgtctccgcattcaccccccgcttacggttcagcgcattggagaccgtcgcgggagaaaatcctgtgatttcacttattttccgtatactaaccttcataataaccgaccttccatttactctgcctataatatatcacatattattttaaaaatgaaggcaactttttgcgcaatcatatttccgcgacttttttgcaagaaacgttaaaagaagaggcatccctgtgggaacccctcttcttcatgcattcttaagatatccaatcttaaattatttaaggttaacttctgcgccttcgccctcaagcttagctttgatttcctcagcctcagccttagatgcagcctctttgattaccttcggagcgctgtcaactaattcttttgcttctttcagtccaaggcctgttacttcacgaacaaccttgataaccttaaccttagaagagcctgcggatactaattctacatcgaactcatccttctcttccgctgctgcgcctgcatctgcgcctgctgccgcaactactacgcctgctgctgcagatacaccaaattcttcttcacatgcttttactaagtcatttaattctaatactgataattctttgattgcatcaataaattcagctgttgttaattttgccattttattatcctccatttaatattattttaattgcagcgggttattctactccgccggtgtttcttctgttgccgcttcttctgcagaggctgcttcttctaccaccgcctcttctgcaggggctgccgcttcgcagttccctgctccgccctgctctgcgatctggttaagtacacgagcaagattggtaattggtgactgcatgcttccaagcaatttggccagcaattcttctcttgacggaatctttgacagttctgtcaggccgtcaacatcgtataccgtgccttcaatcacgcctgcttttaactcaagggcttttgcatcttttgcgaacttgcaaaggattcttgccggagctgtagcatcgtctttagagatcgcaatagcgcttggtccttccaagtgttcttctaaagctgctaattcagttccttcaaaagctctcttcatcattgtgtttttacaaactttgtagacgattcctgcatccctcaactgtttacgcagttctgtatcctgagcaacagtaagtccgcgatagtcaactaatacaacgcttgctgcatctttgacatcttctgcaatagcctgtacgattggttgtttcaattcaacttttgccacgaatggtgcacctccttatagtatttgtccgactgcgtaaggaaataagtgctatatgctaaaaagcctctatatccaaagacatagaggcattgtaattcataataacagaatccaactttcctcggcaggcgtttgtctacttacgcttacgcacctgctgtcttcggcagtcatcgtgagatattatatcatcacgcagattccttgtcaatacttttatatattcttgctattctatttcgcccagaaccgcatatgagggatcatttttatcatcgcggctggtattatacatttcaagatctttataacgggaaatgatgcgggtgttatctcctgcaaccgtcctctttacgatcagccacttgccatcacggcattcccagttatcaatatcccgacacctggcttctacggtaaatgtcttgccttccttgcccggcatcttgcaggcagcgtacatataagtctcgctgactgctttatccccgtccaccttgatcaggatgttcgtcatcatatgatgggtacagatcatatgtctgtgctgctccagcatattatcaataaatccccttcccgttcctctgtaagtggggccatagtctacctggctgtcctctgcgaacacagaataccccagttcattgtcaatacggtcaagcgcgcggcagtaaacgtagatctgatcccttatagcctcttttgccagcagtgtcttaatctcatccatttctttcaactcctttatttttttgcgttccactaatatctgtcctcagtatacaatcccggcgcatttatccaaagccatatccgccttgctttcacgcagcgacaaggacaaaaatgcgtcaatttattaccggacagtccgttcttatatgtcttttaaggatttccacctggattctatcagccctaccgcctactgccagaatcccgtgattaatacgatcgtctcccgaagcctccatccgtctcaacgccacagacaacggaaaagagacagcatagcaagatttgctatactgcctcttattattcatctaatatgcaattacataaccttaatcgggttaatcttaacgccaggtcccattgtagaagtaagcgtcacgctctttaagaactgaccctttacagcggatggccttgccttgttgattgcatcaataagcgtctggaagttgtccgtaagctgttcttcggtaaatgaagccttacctactggcacatggataatgtttgtcttatcaagtctgtactcaatcttaccggctttgatgtcctggattgcctttgtcacgtccatagttaccgttccggccttcgggttcggcattaatcccttaggtccgagaacacgtccaagacgtcctacaacacccatcatatccggagtggctactactacatcgaattcaaaccagttctcgttctggatctttggaatcagttcttctccgcctacataatctgctcctgccgcttttgcttcatcagcctttgcgtcctttgcaaatactaagatacggactttcttacctgttccgtgcggaagtacgaccgcgccacggatctgctggtcagcgtgacgcccatcacatccggttctgatatgagcctcgattgtctcatcaaattttgctactgcagtctttttaactaatgacactgcttccgcaacatcgtagagcgttcctctgtcaattgcctttgcagcctcaacatatttctttcctcttttcattctaaaaaacctccttgtggtaatgtcgggataaccctcccactttctatcgtttacaatttactctagtcttcaacctttacgcccatgctgcggcatgttccggcgatcatgctgattgctgattcaatgttggccgcattcaggtctggcatctttaattcagcgatctcctgaagctgagcctttgtgatggtggcaacctttgtcttgttcggaacgcctgaaccagacttgatattgcaggccttcttaatcaggactgctgccggcggcgtctttgtgatgaagctgaaacttctgtcattgtaaaccgtgattacaacaggaataatcatgtctccctgatctgcagtcttagcgttgaactgctttgtaaattcaacgatgtttacaccgtgctgaccaagcgcaggtccaaccggtggtgccggtgttgcttttcctgcagggatctgtaacttaatataaccttctactttttttgccatttcaattacctccttgtggtgccttcgggaacgtcttcgtccctcccactacctgttacattttcttgacttctgcgaaaccaatttcaaccggcgtttcgcggccgaatagttcaacattgatggttaggctctgcttctgtatattcatagactggataacgccaaccgtatctgcccatgcaccggcaataacctgaaccgtgtcgccttcctgaaagtcaacgacaatgttctcctgcctgatcccaagcggcgccatctctgcatccgtcagcggaaccggcttggagcctggtcctacgaatcccgttacgcctcttgtgttacggacaacataccacgtatcgtcattcataatcatatgaatcagcacatagcctggaaacatcttcttctgtgtcgccttctgaacgccgttcttcatctctacgacatcttgcatcggaacgcggacttccagaatctgatcttccaaatgtctgttttcaattgtcttatcaatgttggcttttactttgttttcatacccggaataggtatgaactacgtaccattttgcctctgacataaactcacctttcttgcccgcagtttatcagttctattttactaataaatccactccatactgggcaataaaatcaacgatcgctatgattattcccagaactacggacacggaaacaactgccgtcgtctgttttgcaagtgtcatcttatctggccaaatgattttcttaaattctctgttaagacctttgaaccagcttttcttctgagtcttatcgctcatgacatccactcctttacggcgactattttgtctctttgtgcaatgtgtgtgacttgcagaacttacagtacttcttagtctccatgcgctcaggatgtgttttcttatccttcgtcatgttgtagttacgctgcttgcattctgtacattccaatgtgattcttgtacgcacaacttccacctcgcttcatgtttcttgtgttaacattgttactggtagcttgcgaggctacccaaattttaggcataaaaaaaagacctacttccattcgctagaatagtgtatcacagaaagccggaaaatgcaagtcctcttttcttcatattgtccgagacttgtccgagtgtccgaggaattcttatttggatcgaaacaatatggcttttggcctttgaattcctcggataattgaaaatctcggataaggcgcgcttatttacttttaagacagcataaaaaaggatttcgtcctattttttcactttttttcttatgccaacatatatcataacgatgacaactgcgctgataccaatcaaactcagatagtacatagcattggattcatcgcctgtttttggccgctcctgcggaacaggctctatttcatagacattttcaaatgatactcctgcaagtttatccaactccccttccggataaagcactgctgtcacttccattccgtcgccatcttccgcattggtaacataaacagttaattcatactttgtcgtatcataagtgcattttggatttgtcccaggcttctgagtaatggtataagtgtaaatacccagattatcatatcttatctccgggaatttcttgctctctgctccagtcagcgtcattgtgcagataccgtcctttgaaccttccggcatcggatatgtcacatcgtcggcagccatttctaccacaaattcttctgccttctcaggaagcgttccttcaagcgatatctctaccggtatagaaacacttaagtctccggcagcaaaagccatctgcatcggcagcatagcgcaaagtaccgtcatacaaagcgctctaactatcttggttattctcgttctcatcttaacccctcctactctcactgtttaacaaggctccatcgcagccagaataatggttcgcgcatctgtaaattcagacgaacaagtcgataacgcaagaacctgcaaattggaatccttcctcagttcattcacggtatcttgatgcaggtgtaatgcattcttctctgcataagatatcaatccatctatgtcattctgccactgattcggctcaaagatataatcatccccggcctctatcagaaggcaggcaaagatttcaagtttatagctcctgtcaggcaggatcagcattcctgtcgtatttttcgtaaaaaatgcctcatctttataaaggtccagatctccgaacatactcccgttcttcatatgatgaccatagagaagtgaatatctgtcggagaatgttctgtcattgcgggaatccagaaagatactcccggcaagggcaaaatcaccatatacgtcctgattcagatagatcatattatttgctccctgtaaaacaggatagtccaccttcgtattatcaagacttacccaggcacatacgtccgggttgattgcaagcagttcctcgaaagacgctttgtcctgatctgcatcaggttttaattttttcatatccgcctgcacatcttcggcagcggcatagatccggttgttgtcccacaatgcataaactgcatatagccctgcagcacatagcgataagacaacaatgaagttgataatagtatttgcggcttttaaaaggattttcgatactttcataactaccggcccgtcaggcagccgcactcctttccatatctgttgttccagtttcacagagggccgcctctggccctctgtaccggatagttttcactaattcttgattattatcttacgcgtgcgaaacgtctcttagcaaagaatactacgattcctacgaaagcagctgcaagaagcaacagatatggcagattgtccataccaattcctgtatcaacagttgtacctttttcgttgttaacagttgctgcacctgttgtatctgccgcaatagtacctttttcacctgtatatgtaacagtgtatcccttagaaggatcacttccatttgtatctgttccagcatgtttactctgctctactacttcataagtaacgccagctggaatgttgttgaaagtaactaaggcatccttgtgtgcaagtgaaagagtctttgttactgtccaaacatcgcctgtctttacccactcattcactgcgatatctgctgcacctgaaattgcactcttaacctctttagtagatgtaaattttacatcgatatcaaacttctgtgtcttgcttgccaggttaccggaaacattctttttaactgataagtttccaagatcatacttattaacaatttcgtcaatttttccttcttttccatcagttgttgtaaatgctgttgttgcaaccaaattgtcattttcatcataagctacaagaacctgaactccgaaagaatttggtgcataagtaacaccctgtgtagttcctgcaacttctgaaactgtatagttccattttcctactttagagtaagtcggaacagtaactacaacactaccagggtttgatgcaactgtatgatctgcaattgtaatcatagttccatccgggttcccttcatcggcagttacgctaaatttcaacgtttcggttgggaatgtagccggagtctcacctgctgaagtctcataccgtttttcgaatgtaaaagtctttgcctctgaagatgtaccgtctgctgcaaatgcaacattactcatgcccaaaactagcgtaagcgcaagcatgatcgaagctaattttttcatatgattttcctcctcatatcttgtgaatttgtaatctatgctgattctgccttcctgacagaatgaagcaactaatatatttacttacagtccctgtctgcgaaggatggtaattgcctttcccttcacatctttcatgggaaccgttccaaaatcccggctatctttcgcccgggtgcgataatctcccaacaggaatatttcaccttccggtatctctaacggatatttcaatccgtctttggcgtaagttggatacaggatttccccaccctgtgtggttccatttacctgaagttctccactttcatccatcattaccctgtcactacccctggccgcaatacgcccaatgtgcgtgtttccgtctaccatgcagacgaccacatcgtccttgacgtaatccttctgcaggcgaaatccgataaccagatccccatctttaatcgctggaaacatatcatttcctttagcctgtgtaataaagaataccttagaaaacaggaaccatcctaacagagcaaggaacaagattcgaaataaaagacgaatccattcctttctctccagcacactgtttctgcgccgcctgattacctgctccggcgtctcagattgatttttctgttgcattacctgttttctcctgtctcggttcactctttctccgtcgttgtactggtttttcccccggcttagtcgaatgggatatctgttcttctaaaagagcatcatatcttgcccgttccgccgaaagcgctgattcatacatagagttgagttcctcgattttcttccatacatccgcttcttctacaccaccgaaaaaagccttcttaaatcgaacttcctgaagccatttactaatacgctgctgttcatgattgagcggacgtgaacgagttttcttcataaatgccacccggcttagtttccgttatggcgtctgcgttttcttatgaatgccactacacctgcagccactactgcaagaatgagaatatatggcagagaatcaagtgcgacacctgtgtcaatagtaccctctctgtgattctctacaatgatctggacaggtcctgttgctccaactggaatagtataactatgatctgctcccagtgttatgttgccgaccttaattgtcatcttataatccgtagcgccactctctgaaatagtcagtgttgaaccaattctgacaccattcagcattaccttatcttcatgaccaagagcaaatgttgcagtcttcttatcagcagaaagcgtgtagccttctcctgcctccatcgcttctgtacagtttacagtaaagccgaactcttcatttctgtctcctatatttcctgtgataagcttctgaatctctacagaagtggttgtcggggtataggtgttagtgatgctgatatccggattgctggctgccgaaatactgtaattaagcgttgcaacatggctccagttacttgtgtttgcaagaattacttcctctgtatccggattatacctcaaacttttcccttgcacggtatatggtccgtttccgtttgtagaaatactataaaaattaaccggtgttttccagttacctccgataccagttaccgctgccgttactgttgctctctgagatgcggtaagtggagtcttggatattacaacacacccatcctttcctgtcagagccgctgcgaataaaacattctgatctccatcaatttttacaggccagtttgtatgactgcactcggtgtatacatccgatgtcactttaaagtctgctgctttgacttcaacatccgctcctgtaccgcttgttgccaggctatatcctggaacctccgctccggactctgttacagaataaactccgactgctgcattgtctattctccattgccatgtgagtccatctgcacctctacttattacattactactatccaacgtataaggtgttccgctttgattagtcacctgtatctgaaattctgccggaatctgattcactgtaattccccggaaagtctttcccacaaggatataattcgcatccggatttatatctgcataggttgcgataccctgatttgctagttccgcccccatatccgcatgctgctcgtcatctgttacaggctctgttaacgcttgtatctctgcttcattttctgctgtgttttcctccggcgccgccagtacgctgatattcattgccataaccatcactaataccaacattgcagacaaccaccgcttacgttttcctgatttcattgttacactccttcctctcttccttatctatatgtcgacgctattttctatccgtctcataagtcacacgattcttcttttgcccgctcactccatctttagtaatggcacaggcatccactgctccgataattgccatgtaccagtccactttctgatacaccgatctcatttccatgaattacattttgcgggtataacgctccctccttactttcctgtacgcttacgtttcacacctagttcttgcccggcatacaggttcttcctaaccactacagccatctcttctgtggattcatgcacgaaaaatcagactttttcgttcggaagtgttatagtatataaacgtataggatagtgcccgtctacaccgtgtaaatggtgttgccggatataaactataccaaaaccatatggatatgtagtaaaatagtgttttgtttactgacttcttttgtctgaaaaagggaacggaaaagtctaccttttctatcaaatatttccagtttctctatttgtttccctcgcccaccggagaaatgtatcttgtgcaataccgagtttctgtgccgcctgcctggaacttatctccccctctttccatgctctgcatagcatcggaaattccggtggtttcggaattttgggtcttccgaaacttactcctctttgcttcgccgccacaattccttctctttgcctctgccgtatattttctctctcggtttgtgccacataggaaagaatctgaagtaccatatctgctacaaaggtacctgtcagatctttacctgtctgacacgtatccagaagcggcatatccagaacaacaatatcggccttcttctcctttgtaattatccgccattgttccagaatctcttcgtaatttcttcccaaacggtcaatggatttgataaccagacagtcgccggcacgaagttttttggtcagtttgcgatacccggggcgttcgaaattctttccactcagtttatccatgtaaatatttttctccttcaccggaaacgctttcaacgcgataatctgtctgtcctcattctgctcttttgtcgatacacgcacatatccgtatacttgtttttccatttcaaaaacctccgttcttcagtattttcctattatccctcttttctttcattttaattaatcctgaatccatgaagttcaaactctcttaattgcagtttcgcctgttggttgacgtgattttctgctataatcttctcagtcaatctcgtttcacgaggagactaagccatgaaagacattaaaattaaaataagcgatccagccggatgaatgttacgcccaaccgttcacataaatttttataacaaacttgacatcacaaaatctatttgttatattacacatagaacaatcaggcagcgttgaatgatgaatgccttatcatacacattgtccgatcacttgcctaagccagtcaggattttcgacccattagcgcggtcagatttaaaggaggtggtctttaatgggaacaaaaagagattattatgagatattgggaatagaaaagaatgcagatgcgggaaagatcaagtccgcataccgaaaactggcaaagaaatatcaccccgacacgaattccggggatgctgtggcagagcagaagtttaaagaggtcacggaagcatataatattcttagcgatccggaaaaaaagaaactgtacgaccagttcggccatgccggcccagatggcggtccggccgattccggcttctatcaaagcggggatatagatgacctcttcggcgatatctttggcgacctgttcagaggccggcagtcaggcagtttccgccaggagtcattccggcaaaaaggcggcaatctccatgccgatatatccgttaccttcgaagaggcagccttcggctgcgataaggttatcaccctttcaagcccggagaaaggccagccgccccagactctcaaagtccgcatccctgccgggatagacagcggaaagagcatacggcttcgtggcaagggaatgccgggaagcagcggcggcgagcccggcgatctgcttctaaaagtatccgttttaaagaaatccggctttgagcgtaagggattagatatctacaccaccgcggacattccttttacggtcgccgcgcttggcggagaggcttatgtacagacccttgcgggaatcgttctgtgcaagatccagccaggcacccagtcaggcactaagatccgactcagaggcaaaggcatcgtgtccatgaaggactcttccgttcacggcgatcaatatgtcaccgtacggattcaggttccaaggaatctaagtccggaggcgagaaagaaactgctggaattcgacgcggtctataaaggcacatcctccgacagcggccggcatgctacaagttccagctaatacatgaacaaatggcatgatatcccaggcaggacgataaatgtgatcgtccgcctaagagcatcatgccatgatcattctgtctccctttgaaccgagaacgccaagtggggcatatacttattgtaatagttcttcacgcacttccccgctaccgtcattttgtttcgctttgcgacattctgggacgcaatattgttgtctcgaataatcgaatacacttcttttgcccccaaaatgtcaaacgcatatttcttacatgcaattgcagcctcagccgcgtagcccttatgccagaaatccttcgccagaagatatcctacctcaagcacctgctccccattcaggtcctgcatcgtcaatccgcattggccgatcacctctccggtttcttccagcactaccgcccacaggccaaatccatcattttcataccgatttaactgcaattccagccactcccgagcctccttgtcatcaaatgcatgctcatacgcatacatgacctcttcatcctttagcatcctgcacagcgcctcgtagtcctcccggcgtatctcgcgcagatagagcctatctgttttcaatatggcctcaatcggagtaaagattgcttccggtttcttcgggcctcttcgctaatatagtctgaatataaataggtacggttctccggctcaagcggaaccgcgttgtataccgtccccatatcctgttcctctccatcctttagaagcgttagatcgatggccccgccggtggggtgtccggcaaccttcaccggcgccacaaactggcaagtcatcttatatatctcctcatcgcttctggcgggatacatcttcttatagtcctgatatgccgtttcaaaactcttcttctgctgggacagcggcctgtaggcttcttttatcagtatctgatagcccggcggcagatatccggcggcctcctttaacatctctgccacagaacgccttgcatggcagaaaaagtctgactggttcatgatctggcttctgctttcatcaaccaatatgtctttgtggatgcccttaagagatgccagttcttcctggttctctccgactgctatgttagaaattcgttcatcatctaatagtaccacttctcttccctccattctccttcgtttcatccattataaactatattcggcaataggggagaaaatcaaaagattgtgttttttattctctattataaacttttcgacttcctgtacgctgccattcttatccgcgtacatcatctgacacgcgcttttattatccggcgcctcatgcttccccctctccgtcgcctggctgctgcaagcgccaaacaagagaaatattaccaggatcatgcaaatattcttaatcattctctccactcctccttagttctcatatccgtctgcattttacaaacaatataacatcttttaagccagttgtcaatttataccatcattttgataatgcaatatcattaagattattttaccataatatatataaaaaggagcattcaatgatgattgcagataagatcaaacaattgagaacatcacgggatatgacccagagcgatctggccaaaaaactgaatataaccagaagcagcgtcaatgcatgggaaatgggactgtctaccccttccaccgcttatctggtggaactttcacagctgttccacgtctcaaccgattacttattagggctttccggcaatgctaccttggatatctcgaacctatcggaaaaagaagttcagattgtctacgacctggtacagtacttccgagacaagaaataaagggttgtcggttaataccgatttttagttcctaaatttcaaaataagaatcccccatagaattcagtgtttctcagcacttgatattctgcgggagattctttcagaaaacacttctctatgatcactttgagaatcttctctttgcatactcagacttttttagaaccacgggagcgcctgcataacaacagtcaccacaatcgtacaaacatcgtgctgcttccataacagatatcaaatccggcaaatgtggaatgtttcagtgcgagaatcctgccacaaatcctccaagaataattcccacactggcaaatatactcgcataaaactgtgcttctgtgaagttcatgaaaaaccatgcaatctgttttggcacagaatctaatattccactaaccaagtttttataatcaaacgtctgattgagcccgctcaatgcagttaagccaaaatggaatccaaggcctatcacgatactgattgcgaatcctgcaagagatcctgtcatcctgttcttcccctgtaattttactgtctcacccatttttgcctcctataaataacattcttccatgtagttactgtaaagcgtcgcatgtaatctctgccggacgcccggaacgctggatatcaaaaagagctgcgtcaacaccaccttgtttatatttagagatgcacagacgtactgtcgctgactgcaagtttctcagtaatttcaataaaggtcataccatctgttgtcttcctctgacagggcaagatatgttctctttatagtattcatcctttcttagataacactattttgccacacattatccaaaaaagatatatagcgactatttaatttatgatgtactagttacagtatttcgaactatttttaaacctgattacagtcaggctgacagaaaaaatactccggctgcttttcagtaaccggagtatttatttggaaagaataatctgtaaggactctgaaaataaggggtgctttaatgattctcgctatttttcgcagcaagttttttccagttgtaatatccgtacatggagttgaataaataagcaacccacatcacaaccattgtgactgcagaagagtcttttccaatcaggagaatccacataatgacggatacgacatttacaatgatccataacagccactgttctgcgtaacgtgcaacctgcattatcaaggcaatgacagagaagacggttgacatggcatcaatcaaagcaagctgtccgccgagatgagtcagaatctgccagtagatgataacgatcacagctgtggcaatcaaaagaattacgatttgttttggcgtcagagctttcccttccacttcaccgctttcttcatctttatgtctcgaccaaaggtagaaaccaacaaagttcattggaatgtagtaaaaggcatttaacatgaattcaccatataaatggttattaaatgtcagataagcgtaaatagcgacattgatcgttgcaaagaaataagtgcttacttttccttttgcggcgagaacaactcccagaattccagtgattccactgatcagagccagtgtattatctccccagatgacactcagtacaatcataataacagtcgataaaaccagccagcatatttcgaatttactccagcctttaaaaaagtcttttactttactcatgatttgtttcctttctctaaatgtttttttcaaattttaatcttgttttgcatcttcaaattcttccgttgtaatgacaggtcctttgacactgactactttagcggaaatccgatttgccatggcaattgcttccggaaatgagttccccatcgttcgcattgcaatgacagcaccgatatgggaatcaccagcaccaatcgtatcgacaacagttgcctgttttgaagggactaaggtgtgaattcctttttcgaaaaggtgtaccccttgttttcccaatgtgattaaaactgtatttccggttgatttagaaagcatttctgcagcctgagtgatatcgtctgtatttgtggaagttacagcttccaattcattcagatgcatgactggatgaagtgcatacatacgtttcgatttttccggatcaatataagtgattcttgggccgggggcataataaacggtcaattcttgattggactccaggaaatttaaaatggcatcaccgccttctccttctaattcatatccactcacataaacagagtcataagaatctacaggaagggcagaaaaccattcctcttgaaaatgacattcgattccggggacggttaagaatgtccgttctccgtctgcttctaccatgcagagacagtatccgttatcagaatcttcgcagtggacaggactttcgtgccccgctttttttagttctttgcgaatgaaatccgcatacattccggttccgattggcgcgaacaatgtgtagtttacaccgaaatgttttaaaatgtctgctacattatacgcacagcctccaaccatcatggattgtcccttggcatagacatctgttccggattttgggatctggtcaatttccataacgatatcgagcatagctgcaccaattacgatacatccttttcccatttgatctgcccccttttttctacgattgcatctgcatattttgtaaaatcaatcttgtttgccttttggatcaaagcaatatctttttcaggaatttcggatattccctgagctgctccacaaatggcagcagccattgccccgatcgtatcggtatcaccacctaagtttgcacagagtaacgcacattttctaacatcaaagctgtaataagcaattgccagagcagcaggaacagattcagaagtatttacacctgctccgacaacattgtataaattttctaaaaatgcagtttcatcatctgcgtaaacttgtgccagacggacaccaagctttgttcttgctcccaaagacggactgggagtagaagcgccaagattcattgcgtatttttctacggaaagcgcatcttcgatcattttttcgcgatcattgtgttccagcgcagaggcaactgccatcgcgatcatagaagcaccggcaatcgtaatatcacttgtatgtgtcacgctggatactgctgcaacgtagcgacataactcttctttttgtgttgtggaaaataatgtcccgatcggtgcaatccgcattgcagcaccgttggatacggattcatccgagaattccttggcactttttccttcctggaaaagtttcaaagcaacttttgatgttggacctaaaatattattttcaaaagcatgtaccttttcggcccagtctaaaatgtgtgtggcaatactttgactattcggaacaaaatctgtttctattaagctgtccaagatagtcaatgcctggcttgtgtcatcggtaaactgacctgctttgtactgataggaaatgatattttccgggcagccatctaaaaagtctgtgattttaccgtaatattccaggcaacgtttccgactccacaattctggcggcattcccatcgcatcgccgattgccattccatataaggtacctaatacgtggttcttcatgttattacatcccctttccacttgttataataagttaaagtctgggaaaatacaattcataaaatccacaaaaaatcaagagaaaatttgttgacttgttataataagcggtttgaaatgatatcttttttggagtataatgatagatacagggcaggaggaatttgtatgaaaaaaacaccaaagtacgcacagatagaagcggaactgatcgcacagatagaatcaggaaaacttgctccgggagcagagcttccaagtgaatccgatttgatcgaatgttatgatgtaagtcgtgtaacagtccgtcgtgcaattgatgagttgtatcatcaaggatatgttgaaaaaatgcagggaaaaagagcgtgtgtcaaagaaaaagtaaaacttcaggaattgacttcggtttccagttatacagaagaaatcatccgacaagggatgacaccctctcgtgaattattgtcatccggacttcgtgtctgcacgaaggaagaggcagaacaactcgggttaaaaaaagcggatccggttttttttatggagcgaatttattttgcggatggatctccattgtgttttacaagtacagtgctgccttatcaattattcagagagattgaaacctatgattttgaacaaaattccctgtaccagattttggaggaacggtatcatatccagattaccacgacttctttaaaattaaaagctgtctctgcatacggaaatatctccaaatctttgaatgtagaagaggatacgccgctgttatattctgacggtattacatatgggattcagaaagatcaggaagtaccgattgagctgtttcaaaactattatttgaccagccggttcgaatattcgctgattcaacgtcgataacaatgtcggtttatagatgtaaagatattgctcctgtacaaattggaaaaatggagttaaaatttggtgaaagcattagaaagaggtcgtgatatgcaaaattttgatttttattcacctacatactttgcgtttggaaaaggcaaagagaacgaagtgggaacacttgtaaaacgattcggcgggacaaaagtactgctaatggagcttatgacagtgttgtaagatcattgaataacgccggaattccatttgtagaattgggtggggtaaaaccgaacccaagaagcggacttgtatatgaagggattgatctttaccgcagagaaggagttgactttattcttgcagttggaggcggaagttcgatagactctgcaaaagcaattgcactgggggtgccttatgctggagatttctgggatttctatgagacaggtcgtatcgtcacagaagcgcttccggttggaaccgttttaacaattgcagcagcaggcagtgaaggttcaagtggttccgtgatcacaaacgaagagagtcttttgaaatggtctgcaggcggtgacgcgaccgtccgaaattctctgtattgaatccagagtatacatgtacactgggggcatatcagacagccagtggtattacagacattttagttcatgttatggagcgttattttacagacacaagacatgttgagacaacagaccgtgtgtgtgaagctattatgaccagtgtgatcacagaggcttcgaaggtgatggcaaatcttcaggattatgaggcccgtgccaatattatgtaggctggaatgatcgcgcataataacatagcaggtgtaggaagagaacaggattgggcaacacatgatattgaacatacagggaacgttctatctgaatctgcagcataagagggggatgttaaaaaccccccaaaaagaaaggggatgtcggttaataccgatttttaaactctaaatcctaaaataagaatctcccataaaaatcagtgtttttcatacttgatattctgtgggagattcttattgttctttttctgtatatattttagggcgcaaaacacccataactgcatttttgaacatgcacattttttaagccgtcttttcctcggtttttccttcgaattttttaatctcttcatgaagaaaacgatgatatttattcatgttccgaccaatggcatacagcatgaattctttatacaccttctctgacgttcggtagttgaatcttcggaaactatcattttccttgatatctccaaaatgtccttctgtctggatggaacggatctgacgatttagactccctttctcactttggatgtttgcatgggattcctctttcaatgtttcccattgttcattgatcttcataactttgtttttctcagcatctttttctgcgttatatttatataagcatttcgctttgtgttcacaaccactacagtctgcacatccgtatacctcaaaagtctgggtataacccggctgttttttggtctctgtgcggatatgatgcaatcctcttccgtcatgacaaacataataccgttcatcctcaaatatctgtgttttcatgttgtaatattttccaatatcttctctgtaagcgcgtgttttccgtttttcatgatcctgcagcttgatgtaactggatatcttatttttctttaaatacagaagatttttctcgctacaataaccgctatctgcggttacttcttccaaaatctccccaaatgcatttttatgcttttctaaaaccggaatcagtgtgttatagtctgtccggtcattgcttacataagcatggacaatgaaataattctctactgcgatctgaacattatatgcggcttttaactgtccgttcagcatgtgatcttctttcattctcataaaggtggcttctaaatctgttttggaatagctgttcctgtcctttcccatgatctcaaaacattctttgtatcccataaggcgtttgccgcaggtttctaattcctcataaagctgctggagctccgatttcctcttcccttttccgtaaacaaacgcaatctgttccttctctgcgatctgagtcagatttttctgaagtttcaaaatctccaatggggaacagttgtcaatctcgatgatcgtattattggacaactttttatgttttgtcagttttcgcttccggttcttttcaatgacatctcttaccttatccattccttcgatcacaaacatatgtgcatggggaatgtcatattttatgccatactcattttcatctatccatgcattatacttctgatacagtgaatcaatcatatcgagtaagcctgcgagatgataattgatcgtccctctccacacaaatgtatagcggtttgcattggcctctatttttgttccatcaataaaaagggatttcaatgtgatcagtccttctttttgcaggcggcggagaaactggtaattcaactcatccaatacatctgcagtcagtcttttattcttgaactcataaaaagcatccctttttggtttctgacctttggtaagccagataaatgcaaggtctctttcgcataattccacaatacggtcaacagctctaatcccacgcatgtttgcgtaagtaactacggcatacatcataattgggttatacccggttcttcccttatctgaacaattggccaacaagccagaaaaatctaattcctccatcacttttttcagggtatagactggatcgtcgtcaggtaaacacaattcgaagaaactgaagttaattttctgttgccctaattcaaaaaattcgttataatacttattgtttagcatagttacattataacatgtaacggagaagagatggttgtcgttagccatctttttctcttttatggaaaaatttcaggggcagatgtgacctggtatgagtcacatctgcccctatttggaactatctatttcccgatagcccctgcgtcattgcgtctggctctttgattattgacatattccgttgttttacattgattagcgtttcctgcttgcactttggacagtagaggggataatttatcagaacagtatcctcccttattctgtcacgggtcttgcctccgcatatagggcagattatccatttgttttccatcattatctttcttgttccttaacccttttctctgagatatcagaacgaccacagctttttttgaactgatattctaaaatgtgttcaaactcattattcagaacatagtaaacactgttttcactaaccgaatatacaaaagaaactcttgtcgcccaaagtccttcttgttttacggattttaatatgcggaaggcttcaacaatcgaaaaattatctccgcattttttaagctgttcgtcagctctttcaaatctatcatcaccagatacgatatacggttttgttatttcgggtcttaatacagaataattagtaataagtgaatattgtgcctgttctaatcggtatcctaatcccggctcaataataagtacacgaccgtatttatccgaaagcatagcttgcattgtagcatctggagcatatacaatcttattatttttcactatattaagtgcatcatcaagcgtaattacaccgtcaataaaactttcggtcagttctgaaatagtacagtattttttgttggcaatatatttccctttctcattaccattcacatagagcaatgtaccaacatttccgttcttatttattccatgaaaggagtgataattgccatcaggcattttgataccaatgcaaaatctatctttttctctgataacagtatgtgtccaaactgcaaggtctatatcaaaattaaatcctacgatggtatcattcccattatgaacaaatctcgtgcacataattaaatccccctaattcgttcgatatttccagattgtatcgctttaatattcagagaaattttttcctctgtccaatcccaccatttcaatttaagcaactctgcgattgtttcatcatcaaaccgttttctgataggttttgctggtactcctcctacaatggtataaggcagtacatcttttgttacaacagcacgagtacctataattgcaccatcgccaatcgtaacacctgccaaaatgactgcttcatagccaatccagacatcattgccgacaatgatatcccctttgttatcccacgcctccgaaacattatttttctcaagttcccaatcatcgaaaaataagggaaacggatatgtggacagagaagacattgtatgatttgcgctattaaaaagaaactttgcaccgcaggcaatcgagcaaaactttcctataatgagtttgtcgtggttaatcggatagtgataaagaacattgttcttttcaaaacctgtagggtcattcacaaagtcgttatacatggtataatctcccacggtaatgcttgtatcggtaattgcattttttagataaatagtctgtgtatcacctgtccgtggatataaaattttagagttcaccatttttgtagtcctcctgttgaaaatgctatatcataattgtatacatcaacaaagctattctcaatacaccaaacaacgcagaaacaatcagtagaaaaagagagctgctttttcagcagctccccataatcatttctgatatattattttccttatggcatataccgaaagatagtattgctccgcaagctcctcaatcgaaacaccgttctgatatttctttatgatgattttgttgcgttcataaagttcctttcggtaaccagacaattcaccccaagatttatgttgttcgtctttggcaggtatatagatataacccgcttgcacatatttttgtagctcctcgaccaacatatcagggagaattgtatttgcattgatgtatttcatatgcaggcttcctccttgattgataaagtcaagtagcaaagccagcaatattatattagcgacttataattactccatgcaaatgtcgctcattatactggctttgcatggagccatactttgtttttccttttcttatttatacacatgatttttcaccaccaatataaatgaatcgttctttaatgcttataagtatagcattaatttttgaatacttcaagctattataaagggttttaggggcttttgcccctaacaagcgaatttggttatccaaattcagtgcttggtaagacatatcattgtacatctcactgacagatataagacttgaatagattgtttaattaagatacattaattacatgggtttgcaaaaaacattcttactgagatataggattgcttctatcccagttttcatagtcaatcaataaaactatttcttgcaaacattgtcgcatttcaaatttgaaaccatcaacttctttcttttttacaaaaaaacggcggttatgagcacttaaatcaccatacttttttaccagttttatatgtttttctaaattacgactaatggaccagtgattacatgatataaatataggaattaaatcgcttaaataataaaaattaccatttgcatctttaatctcatgggcactgctatgcctttcaaaacattcgattattagcgtttcaaataactttcgcatcatcacaaggcacgcatcatataatttagaatcataacagcaacacatttgttcggctgttttcttaatataaaaaggagttccatccaatatagacaagtctattaaagcattacttggagtattaggtatatcatctcgaattatattccttattatttctcttttttgtcttgtcaacgaatacccagtttttccttttaaaaaaatggcatttttcccgccagaatttttactcaaatatgctgaaacatttgaatacggaattagagataaattctcataacaattgcaaatcatctttggtgtaactggtagctgactttcatcacaaagatagtatacaaaatagggtatcatttcacttgatgacattttttcaaagttagggatatttttaataaaagcatctaatgaattgttcaattcttacttattctccttttggtaaatcgtgttcaataaaattagttcctatgatggtcattgagtattttccatcttttcggtttatgtaaccgtactttgaactagaagtatctgttaaattttgttgcaaattattaggaatccgataattcatagacttataacaggtaaaaatatggtcaatagttattccatcaattcccaatatcatttgtagatagtatacaaacgtagcagttttatgaacattggaagaaggatttttctcttccataaaatctttaagactactctttgaattatttccactcaaatcaaggtcttttaataattgaaaattatttgttatatttctttttttacttttatgcgaaacttgtgaaatgacaggtgtttgtccattaacgtctaatttttctggtgcaatttctaaatcatcctcagtatttgaaatatttatttcgttctcatcaaaagaagtttcacttaagagtcctaagccattatttctaatatcgcaaaaaaccttatatacaagttcaccatcaccttgaagcaacatatccattttccctaatgttaatttaatttgtaaatcgctcataaaattaatttccttcctaatatttatttaaatatactatataccataagaatcaataaatcaagtcaatcaatgagattgaattcatatcaagcaagattgaaaccttgaatttgatattctattaaatattataatgcacaaagacgaagtatcacacttacatttttcaaaaaataacgtatctcaaatcttaagaacggcattagccctatgccaatgccgccattgtaattaatcataaattagctctgcaaaaatgatttctttagcttgctgcctgatacaattcatttttccaacctattccatagggttgtcagccttcagctgttcagtaatacccggcgttgtttttaactgttttacactccgacaaaaacgctctcgtgcttgtttgtcaatttcggaaagatattcatcaagcacgccacttgtatgtaaattgatataagtcaacctgcgatactcttgtaaatatctcaaatgctgttgtccataaataccaatatcgttttcctcactcttaggaagtgtaagatttggaatgagataatcgctttgtttgctataagtaccacctaactgttcaaataaagatttcattgtagtttcctccaatatatttagtttttctacaaattcatcatatccaaccgtctttacaaatacttacaaataccccaaaggggcacttctttatgtgaagaatcccttccgccatcctcttttgttttgagacggcgaatggcatcttccacaacagtctgctctgaaaggcatcttacaagaaactggtactctgtgacatcatcgaactcctgaccgcatgacataagcagtttatctgcatcttccaatatcacttttatccgatctgctgtttcgttgctgttgctgtaataaaatgtccgattgaagtcattgagatcataataatgttccagtcctgccaaaagagaatctcgcttattcttgtgcagatatatgacgaacttggatacgcaggtgtacagattattcatctataaacgatttttaatcattactgcgacagccccgttcgcctataatgggtggcacatgatatatgtggaataaggtctgtgaaccttattttgaactgtaaaatttgagaaattcatcttctttttcaaagtgacgatatagttttcttaagaattgcagagaatgaatactcaaggattctccttttcttgtacagcaaagaagctttgtttttcttggtaaatctaccgggataaaatgcagtgaaggattcgtcatacagttttttgtccattcggacacaaacattacagaatctgttttcaacagcatctcttcacaaagatggattgaattgaagaacatgattcggttggtattaaagccatgatcggcgatttcaaaatataaattctcttttgcctgagcttctacgtcaaggcagatagtaagtgcattacgtgcatcctcgatggtcagtcgctctttgttatagtaagcggagttcggaccgacacagacgatgacttctccttctgtaaggggacacatatctaaaagagctgcatctctcatccacatctgttttttctcatgttctccataacttacaatgagtccgatatcagaacgtctatttaatacacgaagaatgacttcaccacgatccacctccaggatattatagtgtacatggttatccgtattttcaacataaagttcatgaaggatatcggcaagaaagtcgaattcttgactggcaaggaaaagtctggaacaatcggcatgattattccggaaagcattattcaggccattcgttgcagtgagaatttgctttgcataaaagacaaagttaatgccctcttctgtcaactcaattccttttgatgtacgggtcagaatcttgataccgtattccgattccagttgggcgatattcttcgtcagactgggctgactgatatatagtttcctggccgcttttgatatagagccacattccaggactttcagtagttgttctaattgttcagttttcaagttaacccctcccccctaataaaattttaatgaataaaaaatagacagtcaacgaatatggaagcattggccattccaaatagttataccccttccatcatcttttggtattttttaagggattttccgttgtgctataatactattatatcaaaaaaatagtgattgtaattcgtcacaatcaccaatgaaatatgcaggaggaggtaatcacttatggctaaagtatgtatcaatgatgtgcgtaagctgatcgagaaatccggtcagattcgtgaaaaactatgtttaggaacacatcgtataggaaatgtacatatcggaggtccgatgtcagcatgtgatgtggctacagcattgtattacaagtatatggagtttgatccggagaatctggatgatccggaaagaaatattttcgttctttccaagggtcacaacggaatcctgttattcaccattttctgcgacatgggaatgtatgactgggatcttctactagatacctacaatacgattgatcatccctttggagcacatcccaatcataagcgcgtaaagggtattgaagtatcaacaggttctcttggccacggactttcctggtgctgtggtatggcacacggtaatcgtgacaagggtatcaaatccagaatctatactctgctgggtgacggcgagatggaagaaggatccaactgggaagcaattctttatgcagcatcccgaaaactggacaatgtggttgcaatcgtagatttcaatcatgcatctgcagcatttgagaccggagagaacctggtatggggtgaaaagggaggtcctgaaggtatggcagactgcttccgcgcatttggatggaatgcagtggtcattgacggaaccaacatgcaggaaatcgacgaagcacttggttctcttcctcctgttacactggacggaaaacccaatgccatcatctgttccacaaagaaaggacagggtgtcggctttatgatggaacgtccctgtgcatggcatgttggcggattcggcaaagagacactagatgaagcagtagcagatattcaggaatacacaaaacagaaactggcggaggtgaagtaatatggcaaatatgggcggtttcactttctgttgtggcgattttggcccggcaatggaagcaaaaggtacagttacaaatgaaattctggaaatgattgatgatgatcctcgtgtttgttacgtcgtttctgacggaacagcaagaggcggccgtacacagacaaaggcattgtcctgtcccgatcgaatcattgacgtaggtattcaggagatgaatatggttacggttgctgcaggacttgcacatagaggctatattcctttcgttcagacattcggtcctttcctttgcgtcagagcactggatcagattcacaatgatgtagcttacaatgattatcccgtaagactgatcggtactcatgctggtatttcttcaggttatggtcctactcataacacaattatcgagtttggtgttatgaatgcacttcccaatatgaccatggttgctccttgtgatgcagagcagtgtaagaaagtacttcgtgcaagcctggattatgcaggtcctatgtatattcgtattccgagaggtgaggagccccttgtttatgagcagggatatgactatcactttgaaatcggtaaagctaatgtaatcaaagaaggtaaagatttgaacattattgccaccggtatgggtgtttatggagcggtaaaagctgcaagatctctggaagagcagggatatgatgtgggcgttattgatatgcacaccatcaaacccattgataaagatgcaatcatctctgcagcaaaagcatccggcaatttgatcactgttgaagatcacaatatcctcgggggacttggttccatcgttgcagacgtactgatggaagctggtgtatatgccagtcttcgtaagattggtgttcctgataccttcgtagagtttggttatccggaagaactgtatccttactataagatggatgcaacaggtatcgaagaagttgcactggagcagttaaagaaatagaaacttaattcccggtccgcgaatgacgggccgggattgttagatatcagaaaggaataaaaaatgagacaattatttgttacttccattcgtgatttcgagaaaaacacgatgggtactgttgatatgatggaagctcctatgccggaaccgaaggatgaagaaatccgtatcaaggtagtttatgcgtccatttgtggttccgatacacatattcttaccggaaatctgggtgaaatggaatcaactacccgttccatgcttcctatgagcttcggacacgagctttccggtgtgatcgataaagtaggttctacagcagaaaagatgggattcaaggttggacagaaggttgttgcaaactatgcaaaatactgtggatgctgcgaaaactgccgcgaaggaaaagtaaacctctgctccaatatgggatatcggatgaatggattttccgagtatgcagtttatcacatgagtcagattttcccgattcccgatgatgcagatctgaaagattatgcactggtagagccccttaccgtagctctttcttccgcagagcaggccaaaatctcctacggaaaatcggtagcaatcatgggtgcaggtggtcttggaatgatgctggtacagctggctcgtcttgcaggagcaagcaccattacagtattcgatattgttccggaaaaactggagctggcacttgaaaacggtgcagattatgcactgaattcagcagaagaaggggtcgctgaaagagctatcgaactggcaggcggacgttatgactgtgttctggaaggaaccggagcaactgctgcagcaaaactgggacttcagcttctggctcgtgacggagatgcagtttacttcgcaatgtacggaaaggatcccatccttccggtaaatcttcagagtgatctgtactgggatcagaaacatattcacggaatgattcagggtgcatggcagtttccgaaatccatccgcatgattcctcgtatggacttttccaagattattcagaaagaacatacactgaccaattataaacaggcttttgaagatctttattcaaagaaatatgcaaagatcgtaattaagatggacgaataggtaagaaagggggagaacctatgagtaatgtagcgaacaatggggcttccggtgagaagactttatatcatggaaaagaagcggtatttcgtaaactggcctttggttcaggtgaaatcgttcacaatgtaccttggatgctggtaagcgcatatcttgcgttttatatgactgatattgcaatgattccggcagcagcagtttctattctgttccttgtgtgcagatgctgggatgcaatcaatgatccactgattggttccctggcagacaataccaatacaaagatgggacgatatcgtccttggatgctgggaacttctattgtatatattcctctggtagttatgcttttctgggcacatcctgattggggcgtaaccgcacgtactgcatggggatgtggtttctacttcctggcagttgttgcagcaacatcttggaatattccattctgtgcactgaatggtgttattactccgtatcccggtgagcgtgcatcctttgcaagttatcgaatcggaatctcttctctggcatgtgcgattccgacagcaatcttccttccactggttgcaaaatatagcaataactacgcaaatgcaccccgaggatttgttcttgcaactattacggtatgtatgattgcagttcctttcattttcctctgtatcggcggaacaaaggaagcaatcaaaccgcccaaagcacaaaaattcactcccaggcagatgttcgagacggtcggaaagaatacgccactccttattatctgcgtcggattctttgtatacggccttcttgcttacggaagaacttctgcagcaatgtactatttcaattattactggggcaatgcagatgcatttaccatctatgcaacagctcgtggacttatctgcggtgtagcagcattctttggagctgctctggttaaaaagctgggcagtaagcgtaatgcattgatgttcggaaacctgatttgtgcagtgattaactttattgcattcttcctgaatcccagcatcatctctgttaagggctgtgttgcaatcctcctgatcgatggtattggtatgggtatccagacatcccttctgtactccatgattcccgatactgttgagtatggtcagtggaaatcaggacttcgtgcagatggtctttgttcctcaaccaccagctttatgatgaaactcggtggtgcgttatcacccacaatcatgttggcaatgcttgcaggttccggttatgtggcaaatgcaactacacagactccgcaggctctgtcttctatcaatatcgttatgaacttagctccggctgttctggctgtagttagcattatcatcttctccttctataaattggatggtaaaatgcatgcacagattctggaagatctgaaagctcgcggacagtttgaagcttatgaagactaaactcctagtcagaaaaactcaaaacctctgaaaaggggctgttgcaaaatgatatgctcccttctaggtagacaagtgaaataataaaaacttgtcacttaggagggagcatattttatgtctaaaaagaaggtatctattgaagataaaatgtatgctgtaaatctctatctagatggtaaagaaagtcagcaccgtattgcctctatgtggaggcttaagagaaatgaaggcaatcgagtaggaggctaaccattagttgattagccgacctctcacaccaccgccatgacggtagaagaagcgtcccagtatttttcggtcggtcaaaacaagataagacagcttgcccagcaggacaggttcggcaactggtatatgatgaacggaaaccgtctgctcatcaagaaaaagcagtttgaaaaaatactggataaattggacacaatctaatgaaaaagagccttgtatgtgatattattttcataagtcagatcgaggctctttcttatgaaaggagcagataacaatgtcagaaaaaagacgggacaataaaggtcgcctgttaaagacgggagagagccagcgaacagacggaagatacttatataaatatgtggacgcacagggagaaacaagatatgtctattcatggaaacttgcacccacagaccccgtaaccaaaggaaagaggaacgggaaatctctaagggaactggaagcagagatacaaagggacttgcaagacggtatcgacaccacaggcggaaaaatgacgctttgccagctttacgccaaacagaacgcacagagggcaaacgtgaagaaaagcacacagagccaacgaaaacagctcatgtggatattagagggagatatgctgggagcaaggagcattgacgcatatgtctttcagacgctaaggaatgagcgttacgcatgaaagaaaaaggctatggctatcagaccataagcaattataaacgctcgttgaatgcgtcattccgcattgccatagcggacgaccttgtgagaaagaatcctttcgacttcaaactaaacgaagtcatagaggacgacagaaaaaagcgacaggcactgacagaggaacaggaagaaaagctgttgtcttttgtccgtaaagacagagtgtataaaaagcattatgacgcaatcgtgatactgttaaaaacaggacttcgtatctcggagctatgcggactgacaagacaggacatcgacttggaaaacggggttatccatgtgaaccaccaactgctttacagcaaggaaacaggctactacatagaaacgccaaaatccaatctgacgaagaagtataacaagtaccatgaggacagcctgccaaagataacgccacatattttgtgtcatacgttttgctcaagactggcaaacaggaacatgaaccctaagagcttacagtacatcatgggacactctaatatcagtatcacgctgaacctgtatgctcatgcgtcagcagaaagcgtcaaagcagaattaagaagcatgatagcctaagttgtaccacgatatttaccacgtttgaccatgaagatatgggaagaaatacaaagataagcaagtatctttcgataatgaaaacgtccgtaaagccgataaaacaaggacttgcggacatataagaagatatgaaaagataatcaaaaatctatatttaatttaataataaagatgctggggtcaaaagcccctattgaaccttaaaaattaaatattttacagtaaattcaaaaataaacttttatgagttataataaaagcaacttatgaaaggtggtatatcctatgtcttttcgtgccaatgattatcaacaattatcgttgaatgataaactgatgaatttaactgaacgagaaacgaaggctttagacaaatcctgggctaagattttcgctgatgaaatttttcctgccatagatgaagaacgtttttctgttttatatagtcataaagcatccagacctaacacacctgtaaatgttattattggtgcactcatcatcaaggaactttttgattattctgatgacgagattgttgaaaatcttatgttggatcttcatcttcaatacgctttacacactacaggttatgaagaacagccgatttcgcaaaagatgctatgattacgaaacacttcatggtgtggatttatatcacgactgcgttaaagatcttagccataaaattgcaacatgatttgtacacttttgagaaagaaaattaccgatatttatttactatgaaaagagtaattcctctcagtagttggtacaacctgaggctttggctgatactcttgttatttataaatgctactgtttaaattatataggttatgtttaattaagaaacaatgacaacaatattagagaggtaataatatgaaatcaactaaaaagaacaaggggatatacttatttttctatatcatcataggacttgctgtttcagtggctttagtagctggactatatcttgcattttttagtcgtttgcagtctttgcaaagcatattggtaattggtattttatttgtagcactaataagtttctttttatcgaaagccccaaaaatatccctcaagatggtaggatatatattttccattatgggattctcaatcttgatcttgtttctttatcagttatttgtggcagagaatctactcaaggtatatatgttttttttcggatcagctatagtgggggagttgattatgtttgtcatcacattgattagtcgggcaaaaaaattatatatgagtataggaagcgttgtgtgcgttgtcgcttcaattcttgttttatgggtgtatgtagatagtagctttaaaacggttgcttgtattttagtatctctggtttatttatacatttcgactttatactatttagactgtgatgatcagaacagttctgaaatacttgaaaagagtggaatggtatttaactttgttgcgctttttattgcattatacggaagatatacatactcatggagaagatagtcgagactgttttaagttttgtggaagctgatataggatatgtcattagtactttaggcagagttttagggttctgagttctgagagacctttatggctgctgaataatgatattgtcaatattagttgacacatttttctcaaggatatcactgactatgctgccagttccaaatcctcataatacttcctgcgttttatcataggaggaagcccgccattggcagagcagatcctccggttattccagtaactgtggaaatatctccaaatgagtacttttaattcctctaccgtcatctgctttgtgtcataacggccgtagagaagttccgtcttcattctggcccacatgctctcgcagcgggcattatcatggcagcgtcctccggcactgttcatgctttgatggatgtggtacttccggatggtctggcggtaggcctcactggtatactgggttccacggtcactgtggatgatcgcgccttccagtgcaggataagcagtcagggcgctttccagtgtatggatacacagatctgctttcatggttgtttccattgccagaccaaggacactaagatcaaagcagtcgaaaatcgcagatacatacagtttcccattggatgccgggatctccgtgatatctgtaatacattttttcaatggggcatctgaatgaaaatcccgcttcagcaaatcatccgatttcatagcctcccggtctgcctttgtaattccgttcggttttcgctttggccgatggctcaggccaatctgctccataacccggtatacggttctctcgctgggaattgatactccctccggctgcttcaggcacagcgcctgatacattcggagccgtccgtaagtatcgttacattcatcctcgctggcaatctctttcatggcatccgccagatcctggtacttccagggacggtctttgtttgcaagatatttatagaagccttgccgactgacaccaagcatccggcagtaaaatgaaattttcccggtcatcctgccgtcctctgttttcaaagccagaaagatcattctctggtttttgctgacttccgacggctggcggcgaaaaaagcactggcttcctccaaaaattcgttttcttccttcaggcggcggatttctttatcctgctccttaacccgcttacgcagcatggtaatctcttctgacaggctcattgcgctggcaggggtatgagaaccttccccaatatccaacttaccagctcttacggctttcagccatgtatgcatggttccttcagggattcctagttctttagctgccttagcgccaccgatttctttggcaagttttactgcctgtactttgtattcatggtcatatttacgtgccactttaaatacctccttattctcttggttttattatgaaatccttgagaataagctgtcaacttttttataccacaccataagcacttgcccggtctcgtgtcaccgcttttacatgtttatttttacttaaccattcttttaatgttttaccatcacgtccatctaaaattgccactggtttatgcgttgcctcatctacaataattgtcccataagtatgccgtttcttaaatgcaaaatcatccactccaatgatgcttccacatggaacttccggttgtgctacatatcgtttggttagcaatcggataatgctgtcaccactggttttcagattcatggaacggcagatacgagcactaccttcacagcttgtttccaatgccaaagtacatataaaatcttcacaacgctctgtcatacggctgtaataattcaaaaagccatccacattctcaacaaaagttgtaacatcacaggaagaattgtcgcactgatactcgtaagcatttacgattaaatacgtggttctacccaaaatcggaagatcttgaagttttcttttataagtaccatgtttatgttctgaaaccactccacacttgggacatgtacaattttttgcttgcacagaaacatggatataaatttctttttcattttgagttacttctgtgatgcccatttcttccgggtaaaatttttgtaaatcaagagtgtctttcatttgttccaattccttccataatgataaaattcctaagacaattctattattttagcacttttgtttcaattccatttacggataattgcggaagaacccactttttccgtgcacgcggtacatttcgagcgatttatacaaagataggagcatttcttaaaatcgattggaatgccattgtcatttgcagatcttgaagccagaaaagaagatattccaaagatggtagaacatctgagcaagagaggaggcgttggaagcttcgtgcgcattcttaataaagaagcagaaaatatttttcgattggccgtgagataggaagtaagaacctagtacatcataaattaaatagtcgctatatatttttttggtaattgatgccgagcctgtttttgccaaacttccttccgaatcagagattgcaatgcaagatacggcagaaggatctgcagcggtcagcatctatatttccggctgcatccagatagaggctgcgccatcctgtcccccagaattattccatgtgctggtaaggacattaaaagagaatgcttgacctggcaggggggaacaaccgtgtatcttgcctgcgggttataactaatgataaattagttcttcatatacatcggcaccaaccccaacgatttatatccatatatagattacattcttatggtactgccacatcattatttagcttgatcatattttacaaatgcatctactttcggctgtgaagagcatcccggtacaaactcacaagtaagaaatgtttctgtcatcaattctctttctttgcttcctgttgtaaatgctcccatacaggcaatattggcatcattacttaaacgagctctctgtgctgaatatacatctgaaagaagagctgcataagcaccttttaccttgtttgctgcgatagatacgccaagacccgttccacacaaaagaatacctctgtcatactcttttgctgcaactgcctttcctaccttaaacgcaacatttgcataaataggatcctcactaccgaaatcagtacatttacctaatcctttgctttcgataaacttaataagatcttgtttttccttttctgcattagggtcacatccaattgctattttcatcgttataatccgcctttctgcgaaaggcaccgatggggttatgaaacccgatggctaaccttttcgctttctaatcaattttccttctgatattgtcttcttataagactgacacactacagaacacatagagatgaattgcgagttcatatagcatcgcccccctttttttatatacaaatctactatttattcaagaacttttttcattccatctgccattgctttcaaaataatacagcatgaagttgctcctgcatctaacacacctctggaacgttcaccaagtctagcggcacgtccatacattgccaccatctcttttgttgactctttccccttttccgcacattcttgcatctcatctagtgcaacagcataatcttttcctgcttctgcagcactcttaacacattcaacgcaaggattcaatgtatctacaagggttttatctcctggtctcgcatcaacaataccatacagaccttcaagacctgctgcaagcatatctccaaacaaagacaacgtaatatcttctgcatcttcagcagcatccgccatctccataaaaatggtcccgtaaattggtcccatagaaccaccaatctcatttaaaagcaccattcccaattccgtaaggccgtccgtaaatgttgtctcgttatccccaagtctttcaccatatgtaacaaaacctttattcatattcatcccatggtctccatctccgatcagaccatcaatatctccgagatactgtttattttcatgcacagcccctaccattgcaagtaagatctcacgaccttttgcatttttaactaccataatattatcctcctaaaattgctttaatcccattgtgttacaatcaagatcaataaggtcttttaactcatcatctagcttcatcacggtcaaagttgctcccatcatttcaagagatgtaaagtagttacctacataagatttgtaaattttaatccctttttcaaccataatcttctcaatctcattgtatagaacataaagttccattacaggggtcgctccaagtcctgaaaccaatacaacaacttcatcgcccgtcttaaatggataatctggaagaacaatgtccaccattctttttgccatcttatctgctgtctcaagttcgcagacttcaatacccggctcgccatgatgtccaataccaacttccattgttccttctttaatttcaaaattcggatgtcctactgcaggaagcgtacatggtgttaatccaattcctacacttcttgtattatcaattgctttctgtgctgctgcaataacttcatcaagatttccgccttttgcggctttagctccaccacatttccacataagaatttctccggcaacaccacgacgtttttctctctgattcttcggtgcagatgccacatcatcattagcgacaacagtctttacatttaatccctcttttttagccatacggactgccatctttacattcatattatcaccagaataattgccgtacaggcaagcaactcctgcaccaccatctgctgctcgaaatgcgtctaaaaaagctgccgccgtcggagatgaacaaatctcgccaactgctgctgtatcacacatgttttttccaacataaccgatgaatgccggcttgtgtccggaacctccacctgtgacaactcctactttcccatcaataggtgcttcttttgctgcaattactcttggatgctgtgttgttttaacaatatccccatgatttttcacaaaaccttccagcatttcatcaacaatattatcaggattatttaatattctctgcatatccccgattcctccttatttaattgtgtatccaccatcaatcaaaagattatgaccagtaaccatagctgccgctttactgcaaaggaaaccgataaccaccgcaatttcttctggttctgcaaaacgctcacttggcatttccttcttgaatgcatctccaaccggaccatcccatgctttatgaccaagcgctgtaagaacaaccgtcggagctactgcattaacacgaattccatacttgccccattccatagccattacttttgtcatagcaataattccgccctttgctgcacaatacgcaacgtgtttatcaagcgcaatcacacctgcttgagatgcgatattaacaatacttccgctgatcttattatcaatcatatattttccaacagcctgtgccataaagaaacttgcagaaagattaatatctatagtacgattccaatcctttgcgtcaataatttcagcactctcaagcgctacaattcccgcacagtttacaaggatatcaacctgaccgaaagtctttacagccttgtcaattacagatgctctatactcagcgtcacatacatttcctgcaacaccgattgctttgtcttcgcccatttcttttgcaatatcattcactcccggattcatatcagccaaaacaacattcactccctgctttaacaggtattccgctgtcatatttccgattcccgctgctccaccagtaataattgctgtctttcctgccaggccaaaatccattgacataatctcttcctttgaaaaattcggtaacattttaacaccctccatctaactaatatattttatacattatgattcttcagaatcttatattgtataaagaaagagcagggctatacgccgctgcccttcctccatccaactcacaaattaatatctgttctcgaaatcagccacattgtcttttgtgatcatctggaatggaatccagatttctttctctacctctttaccatcaagaacttttatagccgcatcaatagcaccagaaatctgcccttcagcatcttggaaatcagaagcaatcattcttccttctttaactgctgttacagcgtccgtgattccatcgataccaatacatggaatgtcatagccaccatcttcgattgcctggcgagcaccaagagccatctcatcattctcagcaactacagcattaatttcatccccatatgttgttaaccatgtctccataagagtcatagcctctgaacgtgaccaattagctgtatcatatgctaaaatcttaattccagggttgtctgcaagtacgttgttgataccttcccaacgctgaagctgcgctgactgtcccataggtccttcaagaactacaatattgaaagcatctttctgcatgtagtcaatcataaactgcatgatttcctcacctgctccaacatcctgagaccctacataagctgtaagcttatcagagttaaccattgtgttgacaccaaatacaggaataccagcttcatctgctgcatcaacacaggcagcacatgcgtctgcatcctgtgggttaagaataatagcgtcaacaccatctgtaatcattgtctcaacctgcttcagttgtgtacttgcatcgttgtttccactgtatgatgtataatttatgcctttttcttcacaatacttcttcgcataattatccattctcatacagaactctgtctccaatgtgtagtaagttgctccgattgtgtagccatcttttttctcagccgagtcttttccctcagaagactcttcttttgagccacatgctgctaatgataatgtcatcacggcaactaaagctacagttattaattttttccactttctcatatttttcctccttctttttgtggattttattttaagtcttacaacttaaaagttcatacttttatataatcttatcagtcagaactcagaccatctaacattactgccagaattactacgaatccttttaccatcatctgataatatgcagatactcccaacatatccaacccacttgacaggcaaaccataagcaagatacctactacagtaccccaaagtcttccttttcctcccgccaagcttgttcctccaataacaaccatagcaattgcatctgtctcatatccctcaccagtgtttgtaacaccagatgtaacacgagctgaggtgataacaccggccagtgccgctaaaacacctgataagatgtatacagatgcaataattctcttaatgttaatacctgaaactcgtgctgcatttgcgttaccacctactgcaaacacataccttccatatcttgtcttgtacaaaagcaagaaacaaattgccagaataatcgcaaatataataattggaacagggagcacaccaccgaacattccaccaccaatatatttaaattctgcagtcagttttggaatgggctttgcatctgtcaaaagataggtcaacgactttgctatactcatcgatccaagagttccaacaaaagctggtactttcagataagctacacaaataccattaaaaatacctattgcaagtcccattgcaacaccaatcaaaatagccacaatcattggttgattcatactctcttgtgcaaaatatgccgaatacatacctgcacatcccataacagcacctaccgaaagatcaattcctccagtcagacagacaaaagtcataccaaccgcaagtaatccattaatggacgcaagtctgaacatatttctcaagttaataaaactgacaaatctaggttttacgagagaaataatgattaccattacaaccaatgccaccaaagaaccatattttgcaataaagtttttgcgttgttgcactttcatcgctgcgcttttctctcctgttgcttctttcttcattttcttccttccctccttacatatagcgcatggccatagtcataattgaatcctgactaaactcatcccgattaaactcaccacttagtttatgattacttataacaaaaattctgtctgacattcccatggcctcaggcatttccgaagaaatcataatgattgctttgccttttgccacaaattcattcatcagtttatatatttccgcttttgcaccgacatcaatacctcttgtcggctcatcaaaaataataacgtcaggatccttcatcatccattttgcaaggacaactttttgttgatttccaccagaaagattttttactgctagtttcgaacttgccatctttactttcaactctgaaagtattttttcagtctttgtcttttcttctagcgatttaataaaaaccttgttgctcagttcctgcatcgatggaagcgttgtattatgagcaatactcattggaagaaccaatccttctccctttcgatcttctgttacataagcaataccatttttaatcgcatcaattggcttcttaatctctaccttcttaccattgagaaacacttcgccgctttctatctttgtcactccgaacaatgcctgcacggtctccgtgcgtcctgcccctacaagtcctactaatcccaatatctctccacgatgcaatgtcagactaatatcttcaaattctccttccctggttagatgttttagttctaaaataggttctcctattttagattctctcttgggatactgttctgtaagttcacgaccaaccatcgcttttacaaccatgtcatgtgttgcttcctgggtattccacgtagcgatactttccccgtctcgaagaatcgtaattttatctgtaatagtatatacttcatccatcttatgagaaatgtatacaattcctgttccacttttcttcaaatctcgaatgatattatacaggttttctacttctctatctgtgatcgaagaagtcggctcatccataattaaaatccgtgcgttctgtgacactgcctttgcaatctcaaccaactgctgatccgctactcgtaaacgtcccatcttcgttcttggattcaagtgaatatgtaacatctgtaacaattcttccgtctgttgatacatttgtttataatcaattaatccatgcttcacaggttcccttccaagataaatattttctgcaacagacatttcaactaccgtagacaattcctgatgaatcattgcaatgcccatcttctgagcaacagcaggggaatcaatctctacctcttgtccatcaattgaaatcgttccaccgtcacgcttatggatgccaatcagaatattcatcaatgttgacttaccagcaccattttcacccattagagcatgtacagaacctgcttcgagagaaaagtcaactgcatgaagaactggattgccataaaaacttttctgaatatccttcatctccaacaacacgctcatgcccttcacctcccatttgtttatcataatcaaatactaacatggagatttttctacgaaaaggggacttttttccgtttaacaggggtttttttcgatttttatatattttctttaaaaaagcaccacttatttgttaatttttcctcaatctgaaggttcactcaaacaaataaatggtgcttttgtttattattcagttgtatcttcttccttctttgtactttctgcactatcactttctcggtttcttactgcaattttctcgaattcctcccggtcaaagatcatacgacctctgtcctttccgaaaagaagaatacgatccgccaaagctatactatccatcatatccaatgtaataatcacaaccgcaatcccttttgatagatactttttcaagaaactgtttgtatactgtcttgtttttacatctacatttcgataaggaaaaaagcaaaaaataatctctggtttttgcagtataattttatgataaactaattcgtatttttctctcagtgacaagtctttcactttacacgcaacatcttcacccgcaatttcttttgcaatgctttttctcttacttctttttccccataaataatggattcgatgatccagattcaggcacaaattgtcctcatatgacatttctgggaacaacattgtctccgttgggttctccagaatcagagccacctccctctcggaatttctttcgcctttatgttcccaccaaattctgcctttattcactttcgcacctaacaatactgcaataaaatcctcccactcaaaattattgtagttatgaacaagaagacactctcctttttccacatcaaacgacacatgctggatactgttataacacacatcttcacatataaatactttctgcccttcctctttagcactggatatattgttttccagaagttgatatggaaaaaaataatgtttctctagattttctgctatcttctcatgttctaagactttaataattctcccatgagacataagagaaactctatcacacatttgtgaaagagcttccattctcgcactaatatatatgaacgacatcccatgttctgcataataacgaataaccttctttaacttttccatatcctcagagtggagagatgatgcaaggtcacgcacaatgataatatctgttttcgcaacaattgctttcacaatctcaacaatatatttttcaaggatagttaattctacaaccttttttcgggtattaatctcaattccaatctctttaaacagacgctccaattgtttattcaaaatacgctcattgattaaatgtcctttaaatccttcccgtattataaaaatattatcagccgcagacagattattgaccagattttcgtctttaaaaatcgaatacacattattctttgctctgggacaaactgcataggtattaaccaacttttcacaaatataaactcgtccataaaacagctgtctgttattctgtacacaatccacaaactcattaagtccataagaatccagcggtacaagtcccatgacttctccttcaaacatctgaaaattaaaattattcagaacctctctcccattctttatgcaagtgactctttccattctcaaaacttctcttttcacgttactccttcatgttctccaactgtctttcacttgttattaacggcaaattaatcactgtatctgtacctacatccggtgtactatacacagtcataccatattcttctccataaatcagatgaatacggttattgacattcataatagcgattccacctttattctttgaaagttgaatactttcaaagacaggctggttcaactgattattcaatttttccaacacttccggccgcataccaacaccatcatcattaatctcaataatcagccgcttttctgtacactttaacacaatcttaattgttccgcttccgatttttctctcaataccatgtataatactattttccacaaccggctgtagtgtcagtttcggaagaagacatcgcagtaaaaactcatcttctttgtcatattcaatttccaaattgattcgttcctcaaatctgtgtttctgtattagaaaataaacctttatattgtccagttcctcttccaatgttaccatattttcgactttgctgattgtataacgaaaaaaagtagccaaagcctccgtcatctctgcgacaacatcattcccttccaacattgcttcgcttcgtatactatctaatgtattatacagaaaatgaggattaatctgattctgcaacgccagatactgagcttgccttttgtttgcatttagtaactgttcagattctaccagatgaatcagaacctttataagttcttcaattccaggtgagagcatacaggtttcttctttaattcctgcacttgtatatcccatcaaaaacaagttcagatacttatcaattctctgatatggccgaaatatagcaaaataaaaaatgcaagaacaaataatcaacgcgacggaatataatatggattcttttatcagtgttctcgttttatatgcataaagcaatgcggcaacgctggtgatcaaccacagaacaaacactccagcacaaagcatatatatccgacaactaagataattccacttcttttttttcattctgttacacccttatccatacagttttctaaactcgcctggtttgatccccgtatattttttaaacaaagcagtaaaatgtttgacatccgagtatcccacctgattacatatatttttaattgtttcatttgaacttttcaaaagttcttttgctttttccatcctaagctgaatcaaatattcagaaaacccaattcccatctcttttttgaataacccactaaaatatcccgtgctgaatccaaccattcctgccacttcttcctgactaattccctccatataatggttctgcatataccgcttggcaatacggattggacgtcttccatcttctttctgcatctgcaaattcttctcaataatcctcaccaagcactctgtcaatatttcaaacagttcatttaagttctgactaagttcgcttctctcagtaaatctggatatttcttcattatcattactcccctttgtaagcgcatgcataccaagagatacgatgatattaatgtaatcttttcccagaatatctttctctttagccaacgtctccttcaggcagtctacactctcgacagccaaatgactatcacataaatcaattgccttggaaaatttattattatattgatcaatcactatcgaccagtctttctctccttcaaactctggtgcttccaatagtttttcgcatccttccaacacagcttcttttaacccctcctgtgcatcttcgaaagaatcccacaactcaaccggtgtttttacttttttcccgagagcagccgagaacgtcattttccacatctcaaatcgcttggcggataacttacttataattacccgaatcgtcttcctgaattcccgttctttcttttctttataattacacaacacataacatttattattctctatgcaaatttcatagtctgtacaaatatctgacaactccgcacatactgtacgttctaatccatctatagtcttctgcattgcctttttatcatattttttcatgctataatgaagctgcagaataaaaaactgaaaatatccctcttcaaaatgataataatactgtttattaatactttctatttcagatcccactccatacgaaaccgacattggaagagcgaaaatcagatcacttctttttttcaaattttcgtcttcgatatactcatatagtttctttcctacctcctgtcgttttctctctttttcaatactccttttcgtctgctccaatgcttcttccagttcaacacgtttaattggttttaaaagatagccactcactccatgaacaattgctgctttagcataagcaaagtctgcatatccgctaatgataattatctccagatgaaaattcatctgacgggcgtttttgattacctcaatcccatcacacccaggcattcgtatatctataatcaagatatccggtctacacttatcaagcatttctattgcctcaggtccattatgtgcaaaccctacaatttccatccccatgcttctccagtcacagagcatttcaatcaatctgcatattttcttttcatcatccgcaattaaaacttttatcattcgtgaccgtcccctcctgactgatatcaaatctattattaataattacgatgattgtaacaaagaataattaaagttgcaaataaaaaagaatgtgtcggtttgaaccactcccaaagaaaaaaccaccattgatgcccgtctcagctgatggattcggatttcaatggcggttttattttattcttataaaaagcaatagatctagacagccattttttcttcaagatctatcacatcaaaaacataaaattgttcaatcaactttgaaactacagttccgctatccatcataactatattgatggtcttaataagcgtgtggtataagaaatgaaggcaatcgagtaggaggctaaccattagttgattagccgacctctcacaccaccgccatgacggtagaagaagcgtcccagtatttttcggtcggtcaaaacaagataagacagcttgcccagcaggacaggttcggcaactggtatatgatgaacggaaaccgtctgctcatcaagaaaaagcagtttgaaaaaatgctggataaattggacacaatctaatgaaaaagagccttgtatgtgatattattttcataagtcagatcgaggctctttcttatgaaaggagcagataacaatgtcagaaaaaagacgggacaataaaggtcgcctgttaaagacgggagagagccagcgaacagacggaagatgcttatataaatatgtggacgcacagggagaaacaagatatgtctattcatggaaacttgcacccacagaccccgtacccaaaggaaagaggaacgggaaatctctaagggaactggaagcagagatacaaagggacttgcaagacggtatcgacaccacaggcggaaaaatgacgctttgccagctttacgccaaacagaacgcacagagggcaaacgtgaagaaaagcacacagagccaacgaaaacagctcatgtggatattagagggagatatgctgggagcaaggagcattgacgcatatgtctttcagacactaaggaatgggcgttacgcatgaaagaaaaaggctatggctatcagaccataagcaattataaacgctcgttgaatgcgtcattccgcattgccatagcggacgaccttgtgagaaagaatcctttcgacttcaaactaaacgaagtcatagaggacgacagaaaaaagcgacaggcactgacagaggaacaggaagaaaagctgttgtcctttgtccgtaaagacagagtgtataaaaagcattatgacgcaatcgtgatactgttaaaaacaggacttcgtatctcggagttatgcggactgacaagacaggacatcgacttggaaaacggggttatccatgtgaaccaccaactgctttacagcaaggaaacaggctactacatagaaacgccaaaatccaatctgacgaagaagtataacaagtaccatgaggacagcctgccaaagataacgccacatattttgtgtcatacgttttgctcaagacttgtatattttcattaactttcaattttctccgttctgtaaactgggattttggaaagctgatattatttcaaattgtttatttctgactgcatgagcgccaaaaatcttccagcatgtgcgccatccatctgtgtatgatggaattgaaatgaaattgacagataatagcgaaagaatttctttttgtatctaccccaaattataaatgggttgttaaaaataccgctattcatgcccactgcaccatcaatttcagtatctataattgcagatgtaccaattaccatacagttttctgaaaggtctctatccttacaattttctgcaacttgcttcgtatatttcagataatcactgttgaatttttctagttcgctcgtaaacagaacgtcgcaggaacttacttctccctctttattttttacaatggtattcacagcgatagtatcatactgaatcaatttatctccaactggaagtaagtaaaattcatctacagcctttgccgctttaccaatacaatagtccatcaacatattaaacttcaaatgcttcttattacttaccttgacaagatttgtgacatccattgtcttaaaaaaagttaccattggattagatgctttcatccaaagctcaaatgccacagctcgtttcgactttcgtgggtcaatctcttttgccatatttacctccgtcaattacaattttattaagatagcaatttgcggatttcttgcgtagttttttctatttcttcgttcaaattgtttttatcaatcggaaagtctggtgtttcataaaatcttatcataaactcatatttcaacagaagccatgaatttgcgtttggtttatcattcctctcctttgcaaatcgaatattatcatcatataaatccagacatttcttttggttcatatataaactcggtttaaaagttgacgaaatcgacctcattaattcattgcttttttctgggttccccagttctctatgaattcttaccgctatcagacgagcgtttacgacattggcccatatcgtatagtttccagcaaataccatatcctcaatcaaatcacacactttgagggcttcctcatacattccaaaagcatataacagcgttgttaactcagcgactattcctatatctttcgacgattttttgctaaagtgtttcagaagttttttgcaatctcgttgtatgtatttaactgttaccttttgcataatcaattctattatctctaggttttccatttccccactcctctgcaaacttccaattcgtctttctctctattatttcaagaatgggcaatcccgcttggaactgcccatcatctctattaaatatgcgatttttccacctttgcacacattcctgcaccaaatgatgtaaatgtgtactttttgggtaatttccaacaataaagtacgtcccgtttacaaggcaaagcggtacatctttacatcattttagtagagtttcgctcccgccggaatatgcgcatctaccatcaaaagattcagtccttcgtgaccatcttcctcatgtacagcactaatcagcataccctcggaatcaatgcccatcatcttcctcggcggcaggtttacgatggcgatacaggtctttccaaccagttcttccggctcgtaatactcgtgaataccgcttaaaatcacacggtcttggcgctctccgtcgtccagtgtaaacttcagcagcttcttggacttcggcactgcttcgcaggcaagcacctttaccgcacggaaatcggacttgctgaatgtctcaaagtccaccgtttcctcaaagattggctcaatcttcacattggaaaaatcaatcttctccggtgctgcttctacatttttttcgagtgcttcggaagctgatttttttacatcatttttcttatttacaccatctaaggacttcattgtcgggaatagcagcacgtctctgatggccgctgaatctgtcatcagcatgcacatcctgtcaatgccgaatcctatgccgcctgtaggtggcataccgatctccagtgcattcaggaagtcttcgtccgtcgtgttggcctcttcatcgccttgcgccagcagttcttcctgcgccttgaaacgttctctctgatcgatcgggtcattaagctctgagtaagcatttgccatctcccagccattcatgaagaattcgaaacgctctacatagttcggatcttccggctttttcttggtgagcggggagatctcgattgggtgatccataacgaatgtcggctggatcaggtgttcctctgcgaactcttcaaagaagaggcttaagatgtcgcccttcttatgcctgtcctcatactccacatgatgcttgtctgccagcgctcttgcttcttccaatgtgctgacttcattccagtcaacgcctgcatatttcttaaccgcatctatcatcgtaattctctcgaatggctttccgagatccatctctacgccattgtaggtgatgatggtggttcctaagacctcctgcgccacatggcggtacaggttctctgtcagatccatcattccattataatcggtatatgcctggtacagttccatcaatgtaaattccggattatgcctggtatccaatccctcgttacggaacacgcggccaatctcatacactctctcaagtccgcctacgatcagcctcttcaggtataactctaaagaaatgcgaagtttgaagtcctcatccagtgcattgaagtgcgtttcaaacggccttgcagcggcgccgcccgcattgcttaccagcatcggggtctctacttccaggaagccttgtccatccagatatctgcggatcgcgcttacgattctggaacgcttgataaacgtatctcttgattccgtgttcataatcaagtctacatatctctgacgatagcgcatatccgtattcgtcaggccatgatatttctccggaagaatctgaaggctcttggacaacaggtttacagcagacgcgtgaatagagatctctccagtcttcgtcttgaacacttctccttcaattcctacgatatctccgatatccaatttcttgaagtctttatatgaatcctccccaacgctgtctcttgcaacataagactggatatttccgctctggtcaaggatattgcagaaagaagccttgcccatcacgcgcttctgcatgatacgtccggctacggatacctgctttccttccatcgtttcgtagttatctttgatctctgctgcgtgagcggtcacgtcatactttgtaatcaggaatggatcttttccatttgcctgaagatctgccagtttctcgcgacggacctttcttaactggtttaaatctggttcctgtactttcttctcctgttcagccacgttaccttctccttccatctgtatctattataaggaacggctaatgtttaatacttcatattccattatgccggcctgggtctctacttccacggtatctccaactttgcagccaatcagcgcctgacctaccggagactcattggatatcttgccttccaggctgtttgcctctgtggagcccacaatcttaaattccatctcttcgtcaaatgtcttgtcaaacactttgaccgtgcatccaacattaattttattgtaatctacttcatcttctacaactacttctgcattcttaaggatgccttccagttcctcgatgcgcgcctcgatatcacgctgctcgtcttttgcagcatcatactccgcgttctcagacaagtcgccctgttccctggcttccttaatcttctgggcaacttccttacgctttactacctttaagttttccagttcgtcttccagcgcctttaagcctgcataagtaagtaatcttttctttgcttccatgtgtctcgtttcctttctttcttatactttcttccgttaccatttataaaaatacgttctgaaatgtaaaatcccttgctccgtctatccgtaaaataaagacactttcacaattccattattatacataaagccggcggtcatgtcaacatttttcactgcgggattctgcattggttaagtatatgtaggacaggtcttttttattatccaaatcctatcggattctggcatttaaaagttctaccaattcctcatatgactctaccttattaatctcatccctcagttttgccgagccttccattccttttgtataccatgctacatgttttctcatctcgcggattcccagatagtcccctttgaactcgatctgcagccttgcatggcggagcatggtgtccttaatctcctgctttgaaggcctgggaggaagtgcgcctgttctttcatattccacaagttcccgaaatatccacggattgccctgcgcgcctcttccgatcatcacgccgtcgcatccggtctgttcccgcattgccagagccttttctccggaagtcacatccccgttgccgatcaccgggatggagacggcttccttcacctgtcggatgatcttccagtcagccttcccggaataatactcctccctggtcctcccatggactgccaccgccgcgccgcctgcctcctcgatgacgcgggcgatctccaccgcgttaatgcaggcatcatcaaatcccttcctgatttttgccgtgaccggcttgcggatggcctttgctgtccgggagacgatgtcatatatcaatctcggattcttcataagtgcggatccttccccgttctttaccacctttggaaccgggcaccccatattgatatccagtatctgaaagggaagttcctcaatccgcttcgccatctcgctgataatatacggatcagacccgaagagctgaagagatacgggatgctccttcgggtgaatggatagcagcgcctttgtattcttgttcttatactgcagcgccttagcgctgatcatctccatacatagaagcccggctccttgttcctggcacagcaggcgaaacggcaggtcggtcacccccgccatgggagccagaatatatggattttctagtttcacgttacctatgtccaattttgcacaccccttgagtcaattttacacaccagttttgcaagttgacacgtaacatttttgcgatgagcacgtaacacttttcaaaagtgttacgtgctcatcgcaaaaatgttacgtgtcaacttacctaccgtcggttcttttcataaataatccgcaggcctttcagcgtcaactgggagtcatacacatcaatcacattcgtctccggcgctatgatcttgccaagacctccggtggcaaccacctttgcctccgggtagccggattctttcttcatgcggttaatgatgtactctgtctgtccgatctgcccgtagaccagcccggcctgcatgctggagatggtctctttggcaaggatggactctggcttcctaatctcgatcgccgggagcatggctgcctgtccccacatcgcctgggcggaggtccggatgcccggcgccgtaacagcggcttcgaaggttccatcctgccccacgagatcgtatgtcgtggcagttccgaagtctaccacgataaccggtccgccgtgaagggtatatgccgcgactgcatccacgatccgatccgatccgacttgtcttggattctctgtcacgatgcggatgcccgtcttgattcctgccgataccacgataggcttgacaccgaaatatttgataatcgcgctgcccagcgaatgcatcacatccggcactaccgatgcgataatgaccgcattgatatccatactcgacaccccctggtgctccaccagttcttttagcgtaattccgtattcatcggatgtccttggctgctttgtcgtcatacggtatgttccaagaagttcatctccccggaaagcgccaagcgtaatattcgtattccctacatctattactaacagcatgtcttgtcctcctatacctcttccccaaggaagaatactttgtaataaacctgcagagcctgaagcaattcctgcttctccttctgcagttcctttatcttaagccggctaccgatctcgtcgaacataggatcaccttcttcggaagtaacctcgaagcaaagttctccgtcttcttcatagaccaatgtcaaaatgccacccacgtcatgaacgtagagaacgcacataatcttaagttcatttttcaccgtatccggcagctgctcaaaatccgggttcagataatatttctcttcataagaattggcgccgcacagcactacttttccatcatacatatccatatactcctctgaccgatacttctcctgcaaatatattcttctcctgcccatcagccgtctttacgatcaactctcccgtctcgttgattcccatggcaaaggcctcgtattcatggcccggctccaaaaccttgacttcccttcctctgtttaccagaagagaattatactcctccattagcccggataagtcctcggtctccataaacttatcatagcatttttcgaaactttccataatcgccgctatcaactgcgaccgctgtaccttatgccccaattccaggcaaagggaggtcgcccgctccttgatcgcctgcgaaaataattcctgattcacattgacgccgatcccaatgactacatagttaatatagtcaatctccgcactcatctccgtcaggatgccgcagagtttctttccgttcaggctcacaatatcattgggccacttaatcccagcctcaagtcccgtcaccctgcgtatgccttgcgtggctgcaatggccatcagaagagtcatctgcggcgcctttaccggcattatacccgggcggagcaaaatggtcatatatatgctggttccttgcggcgactcccaagatcggcctctgcgccccttgccggcattctgtttgtcggcaatgaccagagtcccgtgttctgcccctctttccccctgctctttggcacgggtattggtagaatccgtctcgccatagtagaccacatgccttcctgcccattttgtgctgatcaggctctcaatctccacctttgacatcacatccggactatctacaaggcggtaccctttattacgtaccgcctcaatctgatatccctcttttttcagttgttccataaccttccacacagcggtgcgcgatacctggaactgttcgcatatctgctgcccggacaagtaagtatcgcttgacttaagtaagcgcaatatctctgacttcatatgaatctatctttctcctaatgtcgcaaccatgactgccttgatggtatgcatccggttttctgcctcatcgaatactttggactgggcagattcaaacacttcatccgtcacttccatatcgctgatgccatacttttcttcaatttccttgccaatccttgtcttaaggtcatggaatgccggcaggcagtgcagaaagatcgcgtcttcccctgcattctccatcaccttcttcgtcaccttataaggggacagttcccggattctctcttcccatacctcgtccggctctcccatggatacccacacgtccgtgtagattacgtcagcattcttggtcccctcatcaacatcttcagtaagagtgaccgtgccgccgctttccctcgcataccctttgcaagtctctactaactcttcatttggaaaatatgcctttgtcgtgcatgcaacgaagtgcattcccatcttggcgcaggcaatcatcagggaattacccatgttgtatctcgcatctcccatatataccagtttgattccctctaatcttccaaaatgctcacggattgtcagaaggtcagccagcatctgcgtaggatgatactcgttggtaagcccgttccataccggaacgcctgcatatttggcaagagcctccacaatcccctggccgtatccacggtactctatgccatcgaacattcttcccagcacgcgggccgtatcctcgatgctctccttctttccgatctgggaaccgctgggatccagataggtagtccccattcccatgtcatgggctgctatttcgaaagagcagcgtgttctggtactggtcttttcgaagatcagcgcaacattcatgcctctataatggtcaactaatactccgttcttcttcttttccttaaggtccgcagccagatcaagaagatatgtaatctcttccggcgtaaaatccttcagcgtcaaaaagtttcttccttttaagtccattttccgtccctctcttactcctattaatacatgcacgaacctgggaaggttcatctgatctcgtaaagtttcgtatttcttatatacaatatcatataattggtccactgtgtatatctgatatttgggaatatgcaatatttttgcagcagcctccagcattcccataaaaagttccttatctgagaagcccaaagacagtttcagcacaaatccgatctccgctttttcgatctccctgatgcctctgagcagttcctcgtagtattcatcttcatgggtctgctccagataatagataaatccttccagcccatacagcatccttttggcatcaaaatatccgattcgaagattctggcggcttcgttttccagaaaattctatgatgctgccaagcttgacacggggagtgatttcgtattttaccccattctcaggcatcttgacccgtggctcccttccgggcccgtagatccgaatctcaatgacattttcgtatcccctgcccacgagggaacttaagggtacattattaataacgcctccatcgatatatttctttccgtggagacgttcatttttaaatccgatgagatatgcgctggccagcaggaaatcctccagaagcccctctggaatatcctccacgctcaagtccagttccctgaaatcagacaatgagaatgtcagcaggcagaattccttgccgctcttccttatggcatcttcgtcaatcacttcgtggatcaggttccgaagcggggtaatgtcgatcccgccgtctttcatttttttccagccttcgttcagaaactccttgatcgtagtctgcttgtgaaacaggcgctccatccattcatcatccacatccatgaccgtggaaaatgtcatcttactccagatatcttctgccttttctacttctcccatgcaaacgagggcgccatttaatgcgcccacgctggttcctgccactgcattgatctttactccggcttccacaagcgctttccacgcgcctatctggtaagcgcccctggcgcccccgccgtcaaatacaaggccatattcttttgacatgtcaatgatgggcttcataagtcccacaccctttcatgctagttcggattgtcgtcttttgctccaacttccgtcaaggattttaccagtcccgccattccctgtatctctgatggaatgatgatcttagtagcctttccgtcagctgctttctcaaatgcttctaggctcttgatggtaaggactgcctgatccgctcccgcatccttcaggaatcggataccatccgcattcgcctgctgtaccttcatgattgcctcagcctcgccttccgcctcgcggatcatagcttctttcttcgcttccgcgcgaaggatggctgcctgcttctcagcctctgcatccaggatcgcggactctttgtgtccttccgccacaaggatggtagacttcttctcgccttcagcgcgcaagattgcctcacgacgctcacgctcagccttcatctgcttctccatcgcatcctggatggctgccggcgggatgatgttcttaagttctacacggtttaccttgatgccccatggatctgtggcaacatcaagggacgcccgcatcttcgtgttgatcgtctctctggatgtcagcgtctgatccagttccaggtcgccgatgatattacgcagggtagttgctgtcaggttctcaattgccatgatcggattggcaactccatagcagaacatcttcgggtctgtgatctggtagaatactaccgtgtcaattctcatagttacattatccttcgtaataaccggctgcggcgcaaagtccacgacctgctcctttaaatcaaccttccttgccacacggtcaaagatcggcagtttaaaatgaagccctgtcccccaagttgcctggtaggctccaagcctctcaataaccagcgcctgcgcctgtctgacgatcctgatacaagagatcagtaccaaaataacaatgatcaatacaacaattccaattactcctaatcctaacatcccttctcctctctggctcttactattagttttacgccttgaatcccttcaataactacaactgtattctttgcaatcttgccgtccaggtcatccgtctttgccgaccattcctgaccgttgacttcaacccgtccttttgattgaagcgtatctatatcttccaataccaacgcctgctgcccgatcaggctttccgcattcgtcttctgcctctcctggttaaaaaacttcactgcaatcggccttgtggcaatcagcagcaccagtgacactacaataaagacaattacctgtaccaccatgccaaaccccaggatgcctgtgataaatgccaccagggctccgcctgcaaaccagatggttgtaagccccattgtaaagatctctatcaccagcagtattacaaataatatcaaccaatatactgtctgcataagccttcctctcttttcttaattagtatagtattccttttctaccatattactatactttaagttataaagcaattacatatgtcttctttgccgtgccgcttcaaacatcagaaccgacgaggcgatggccgcattcagagactctacccggcctttcatcggaatctttatataggtatccgcctgctgcgcgatttcctcatccagcccgtttccttcattgcctatcaagaacgcgcaaggcttcgtataatcagcctcgtcataatcctgcctgccatttagatgcgcggcgtagatgcagatccctttatccttcagacgtccgatatccttcttcaaatcctgcgaataatagaaaggcatccggtaaatggatcccatggtagagcggatggtcttcggattgtagatatccacgcattcctgatccagcaggattcccgtcacgcctgcgccctccgccgtgcgcagtatggttcccagattccctggatcctgcagccggttcagcacaatcaaatgcgccgccctgcctgccgccgcttcttccagtctatagtccagctgcttgaccacgcacaggattccctgaggagtcttcgtatccgacacatagccaaaaaccgtatccgacaggatctccagatacgcgccgctgccttttagtgcctcatccgtcatgcgcctctcctttttatagaatgattccgaagcataaacttcttttagcagcattttcggtgtttcacgaaacatccgaattccctccacaagaaatacgccttcttcatcccttaattttctctttcttttcaggtttgccaaatgcttgactttggcgttcgcggtactggtaatcattgctgcccttcctttctataactgttccagcgcgtcgttggagccaaccaggatcagaaccattcctgcttccagaggttttaatggatccgggttcacttccacgtcctcatccactttgatccccactacattcacgtcatgggatcgcctgacatccagttcctgcaaggacttccctacccagtcttttggtacggcaatctccatgatgctgtattcagacgacaaggcaatccagtccgcaaaatttgccgacaccagattcttagccgttcgtatccccatctccttttccgggaaaatgactgcgtccgcgccaatcctttccaatatggtggcatgcagcttattctttgcctttgccatcacatagggcactcccatctccttggacaccagggtagccataacgctggcttccatatcatccgccaccgccacgatgacgccgtccagattcctggcgcccatagtgcggatgacatccgggtctccaatatctgctttcatagcataggataccgagtcggaaatctcctgaaccctctccatatgattatctactgccacgacttcgcatcccagccgctgcagagtcactgctatactttctccaaagcttccaaggccaaataccgcatattgcttcttcattcaatcttcctccattatccaaccataatccgttcatccggcaattctctaatcttgtctctgtaattcggcttccccgcgaataccagggccagcgtcagcgggccaattcttcctacatacataagcgccataatgaccgcctggcttccccgggccaggctaggcgtcaggtctgccgtaagccccaccgtacctatggccgacgccgtctcatacatcacattgatcagcggcacgctggcgggctctatgatcaagacagtcaccgtgccggtaataaataccaggaacgccagcatggccaccgcgaatcccgtccggaagttttccatggtgatcttccttccgaagcactccgtatccttgccgccccgcacgaatgtaatgcaagccattaccagcatggcgatcgtcgtcgtcttgacccctccggccgtaccgccgggggagcctcctatgaacatcaggatgcagtcaagcagcttgctctcctgcgtcagccctgactgggataccgtgaagaatcccgccgtcctagtagtcaccgactggaacatggatgccataaccttctttccgaaactaaagtctcccatagtctctggattatggtactccagcagaaatgtcgcaatcgtcccaattgcaagaagaatcagggtagtcacgattgccagttttgagtgaagcctgagtctggtaaaccaccactttttcggtacctcatgcctggatatccgttttccattggtgatcacgtcatgccacactgagaagccgatgccgcttagaataatcagcaacattgtcgtaatattgatcagcggatttccggcatagtctgcaagactgttggcgcccaatatatcaattcccgcattacagaaagcggacacggcatggaagattgaatagcaaattccccgtaccagcccgaattccggcacgaactgaaacgcatatagaaaggctccggccccttccaccaggaacgtgccggtaatcacccgcttcaccatgcccaccatgcctccgagggagtccatgttgtaggtctcctgtatcaccacccgttcccttacggtaatctgcctgcgaagaatcagaaaaaatacggtggcgcacgcaattacgcccagtccgcctatctggatcagaaatagtaatataaccttgccaaatacggtaaactgtgccgccggcgttatggtgacaaggcccgtcacgcagactgcggaagtcgccgtaaatagcgaatccataaaagcaatgggctgctggttggatatcggaagccataggagtactgcgccaacaaatatgactcccaggaatccaaataccaatatccgcatcgtattccatctgatattctgctttttctgctgcataaccttatctcctttggcgccgattcgcctgattccttagactttgcgtactatgatagcacattcatatggttatttctagtggtccttatccagtttcctgccgccccaggaaacaggcacaggaacagcactgcaaaaggcacaggccgaaacgacccgtgccttccatatacaatctgtcggaatatccgaaatatatgttccgtcctataccttgaacctgtatccaactccccatatcgtctcaatatactgagggttggaggtatccatctcaaccttctcccgaatcttcttgatgtgtactgtaaccgtggcgatatccccgatagactccatgtcccatatctcccggaacagttcttcctttgtatacacatggttcggatggctggcaagaaaggtaagcagatcgaattccttcgtggtaaatgtcctttcttcttcattcacccacaccctcctggctgtggtatcaatcttaaggccgcggatctcaatcaccttgttggcctccaccgcgcttcctgtcaggcggtcataccgtgccagatgggccttaacccgggccaccagctcactggggctgaatggcttggtcatatagtcgtccgccccaagcccaaggccacggatcttgtcaatgtcatccttcttggcagacaccatgataatgggcgtattctttttatccctgatctgcctgcagatctcgaatccatcaatcccgggaagcataagatccaggatgaacatgtcaaactcctcgcccagcgccttcttaaggcccgtctcgccgtcattggcaacctccaccttgaatccgctcagttccagataatctttttccagatctgcaatcgcctcttcgtcctcaactatcaatatcttactcatgaaatcggcacctcctgatattttcttaagacaaaatacatggtcgttccagtttcctccctgctggttgcccatatcttgccgccatgctcttctataatcttcttgacgatggaaagccctatgccgcttcctcctttggaagaattccgtgaagcatccgtccggtagaacctgtcaaatatattgggcaggtccttggccgcgatcccttttccattgtcctccagttccacctgtatgaagtctcctacgtccttcacccggagattaatcttccctttcggcttatccatatacttcagggaattatttacaatattgtggatgaccctcttaatctgctccgcatctgcgattaccttgacgctgccttccacgtaattgaagtacccaaactccacattctttgactccagctctatggaaagatcctccacgcagtcatcgaaataggcatttaccgacaacgtattaaagttataaggaatcctgttggtgtcaatcttagtgtaaagagtcaactcattgatcagcgtatccatctcattggctttattataaatggtacggatatatctttccatcttttccggcgtatccgccaccccgtccatgattccctccgcatagcctttgattgccgtcaccggtgtcttcaggtcatgggagatgttgctgatcagttccttattctcccggtcgaatttgattttttcttctgcattatccttcagcctgcagcgcatctgttccagatcccggcacaggcttcccagctcgtcttcggattctgcctccagttcaaagtccagattcccgtcccggatatttttagccgctacctgcatcttccccagcggccgcatgatcgcccggtaaatccagaatatcagcaaagccgccgtaagaatcagcacaatgatgattccaaataccatatccacaaagaattcctccacttccggaatcatgttgctcacatccgtgacaataaaggcactcccctcctgcccatccgaatagtggaaatctacctgcttgatcagcgcctgggcttctccccccagatagatcccgttttccgaggtattctccgattccccatagtctgggagctgtccgatcacatggtttgcctcatccatatccgttcccacatagataatggtgccttccttgcgaaccagcaagtatgccttcttctcctccagcttctggttgaattcctccaggcaggtggcgtcctccatcttgcgcggattcttctttgccatcttggccagttcatggtatggcttctccgtaagccttgacattacaaggacagaattggagaaactctttaccgtggttcccgagatctcatacgtcttttctatagcactgatctgataccgtcccagcaagcaaaccatcgtgacggtcagaactattggaattaaaataagcgtcaaaaaagcgatgcttaatcttgtctttaacttcattcgttcatgccctccaggaaaagtatagcatgaaaaagggcgcttcacatcaaagcgctcataaacttttctaaaatttttataaatacttcttcagtacttccaccttgtcaagcttctcccacggaaggtcgatgtccgtgcggccaaaatggccataggccgccgtctgcttatacagcggacgtctcagatccagcatcttgatgatgcctgccggacgcaggtcaaagttctcgcggatgatctctaccagtttctcatcgtcaattctgccggttccaaaggtgtctaccatgatagaggtcggatgtgccacgccaatggcataggacagctggatctcgcatttcttggcaatccctgccgctacgatattcttagcaacataccgggccgcataggctgcggaacggtctaccttcgtgcagtctttgccggagaatgctccgcctccatggcgggccattccgccataggtgtctacgatgatcttgcggcctgtaaggccgctgtcgccatgaggcccgccgatcacaaatcggcctgtgggattgatgaagaacttcgtatccccgtcaatcatcccccgtggaataaccgcttcgaaaacatgtttcttaatgtcctcatgaatctgctcctgactgatatccgggtcatgctgggttgacagcaccaccgcatccaggcgtcttggaacgcctgcctcgtcgtattccaccgtcacctgggtcttgccgtctggccttaaatagggaagcgttccgttcttcctgacttccgtaagttttctggccagcttgtgagccagggcaatcgggtatggcatcagttccggggtttcatccgtggcgtagccgaacatcattccctgatctcctgcgccgattgcctcgatctcttgttcagacattttattttcctttgcttccaacgccctgtcaacgcccatggcaatatccgaggactgctcgtcgattgccgtgatcacgccgcaggtatctgcgtcaaatccaaacttccctcttgtgtagccaatctcccttaccgtatccctgacgatcttctggatatctacgtaagcgttggtggtaatctctcccataacaagtacaaggcccgtggtggtgcatgtctcgcatgccacgcggctcatgggatcctgctccataagcgcatccaggatcgcatcggatatctggtcgcacatcttgtccgggtggccttctgttactgattctgacgtaaataaaagtttttccataacattctctccttttctactaaaagggacttgccctttcgcacactttctccctggatggatttattccaggcttgcggcggtcaagagacatgcgacgcaaggcctactccaaaaaacagcccgcataaagcggactgtttatatcatcataaaccaatcctcttattgttcgattactcgctcaggttggcaccttccacgcgccgggggttgccgcagcttcatagatcctttgtatctccactgctctgaataagagaaagtttgcaatatttaattaatggttctatgtacgaataagactttacactcttttcccctaattgtcaacatacaccttatggaatttgtatcatgtcttgttaaaagtacctggttccccacaatcctgccgcacatgctatccccgcgatgagaaatgaagtattaagccctgcaatgtccagcagatacggacacaggatggatgccagcccatagcccagcatgactgccccaaagttcatgccctgatacttcatgccaaaatgctccgataccagcaccggaaatacgctgaccacgcctccatacaccaggcatactatggaaatcaacaggatgaacaagccgcctctggcagcaataagccccaccacggataccatagccagcacatacatgacccggatcaccgccttgcgcccggtctgatccgacagccagggcataacaaacctcccaatgatattggcaaaggatgcgatcatgacgcccgccagcgcctgtgcgctggtaagccctctcttcattcccagggacttcatcagaggattgaccagtacgtatgctggaaccgccagagccatggtgatggcaatggcatagaacgccttggtatgcatcatttcccgggtcgtaaactgcctctggattgccgcctctatgctttcatccggctttgcgcttccatctgtccttatcactccctctggctttgtgcccccatctgtcagcacgccgccctggcttgccagttcttccggagcttcctcgatgaagaaggcgcccaggcagagaaccgcatagactgccgtcaccaccagcatggcagtccggtacccatatcccgccagtatggaatcgcacaatggattcatcagtacccctgagattcctatgactcctaccgtaattcctgtgaccagcccccgcttgtccggaaaccagccctggggcaccgccaccagcatgctgaacgcgcagcctgatcccaggcctcctaaggcgccatatcccagcgatataacccaaggcatatgactaggcgccaccgcggccagaaaaaatcccaggcacatgacaaggcttcctgcaagtatcgtctttttcgcccctaccttatgctgcaagaaccctcccagcatgtttcccagagcaaatataccgataatgatcgtgaacggctggctggaagctgccagggaaagaccatattctttcctcacatagggctggaataccgtccatatgtaaggattgccatgcacaaagttcacgatggaagcaatcgccagtattgcgtacctgttcttaatcttcttcatcctcgcacctctccctttccccggcataaaacatcgtaatataaaactaggatggaatttttcaactccatcctgcctgactagctaacttttaatttgaacttctggatatctttctccgtctccaccttctcgatgattcctccgatacccctaagcttatcttcaaatctttcatatcctctctggatatatacgatatcatctacgatcgtgattccatccgtggcaaggccagcaatgcagagcgcagctcctgccctcaagtccggcgcgctcactcttgctcccgtgaacttcttcacgccttcgatcgttgccgagttgccctcgatcttgacgttggctcccattctagccagctcatccagatacttgaaccggttctcgaagatgctctccgtgatcgtacttgtcccctggcacagagccagcgtcaccccgatctggggctgcatgtctgtcgggaatcccggataaggcagcgtcttcacatgcgtgctggtcaagtctcctttggaaaccacgcggacagcatcatcgaactcttccacttcgcatccgatctccaccagttttgcaatggtcgcctccagatgcttcggaattacatttaagacggttacatctccctttgtggccgctgccgcgaacatgaatgtcccggcctcgatctggtccggaattacggaatactccgtactgtgcaggcgctgcacgccgcgaatcttgatcacgtctgtcccggcgcccctgatattggctcccatgctgttcaggaagttggcaacatctactacatgcggctcttttgccacattttccatgatggtcagtccatctgccatcgttgcagccatcatgacattgatggtagctccaacgcttaccacgtcaaaatatatatgcttgcccaccagacggtctgcttcggccataatctttccatactcaatgtccacatccgcgcccagagcacggaaccccttgatatgctgatctataggcctgctgccaatattgcatccgcccggaagcgcaacttccgccctcttatactttccaagcagggcgcccaggagataataggatgcgcggatcttcttgatatagtcgtattctatgttaacatcgttaatgcctttaccattaatctttacggtatgacggtcaacccggtgtacattcgcgccgatgcctgatatggcatccagcagtacattgatatcgttaacgtccggaaggttatcaaccagtactgtctcatctgtcataattgctgcggcaagaatcgccagtgcggcattctttgctccgcctatttctacttctcctaccagcggatggccgccttttataatatactgttccatactgcacctcaaatttactatctattcactctcatctatccatttttttctattcgcattcttcgatattataccatagaatttgaatttgtaaaacattttttacaattatgtaatttatccgtaatattttccaggattttactattgaccgagagtctccagaaccttctggatcgtatcttccaaccttaatccgtcttcacagacggtaatatccgcatatttctcaaaaaggcgcactctttcatcatacagccccttcaaagactggccttctttcagcacgacgcctctgttttttgcattcttcaaccttttatttattgtgtcaaaagatgcctgcaaatatactattttaccaatctctttataatgtttcatggcattttcgcaatatactacgctgcctcccggcgatattaccgtatgccacgtatctaccttcgcatttacacggtcttccacttccagaaaaccatcgattcccttttccgcaataatatctttcagcagttttccttcttcttcctgaatcagaatatctgtatccacaaactggtatcccaggcgttttgcgattacgacgcctatcgtgcttttacccgctgctggcatgccaatcaatatgatattatccatatccggctgtcctcccctagtgtctttgatgagtattttaacacacaaggaccttttttgtctaccctcctgcaaatccaaaaggagtcagacccttttatcccaaggtctggcccctttctttcattagtaaaattttcttttgaaattcctgtattcgcttcgcctgttgcataattcctgatatgccatcacctgaatcagatccttcagccattcgcccggattctcctcctcttgtgccacttggtcataaattcttctgcacatcagccgaagctgcagctgatccggatattcgtcatacatcatgcttccttcatattccagccggtcgcattcttcttcgatatatgggatcagacgttttgccgctgcaggatagaggcttttcatgtaatccaggtcccttctggcaatcctgtcgtcatcatagagtaaaggcatcgggtaagccatgtagtaaggcagtcgatcgtccatgtacgcacgctcctaagataagtatctatcttatcatatgcgttaggattcacaatgttacttgccttactttccttgcattctattcttcttataatcatattggaatttttaattgcttttcctcagaactaaaaatccggaaccaggcgaaaatataaaacaacaagcatacaggcggatgacatacgccatccgcctgtatctgcctttcttatatcaggctctctcactgtaatgatgcgcttcttcaagcatcatatcttttactttcatcagacgaatctgggaacttctctcgttctcatccaacttcatcgtaatatacttgatgtttttctgtgcttccggaataataacgtgttccaacgcatttacacggcgtctcgtcttctcgatttcaaccgccataagctggcacgctttttccgtctccgcaagtttcagcatatccggcagtatatctgccagtgactttacggcaccatccagatcgctggaagtaaatgcgaagccgtaagagtagatgtcattggcgtccgccgtcctggtcttcgtttcaaagaccgggatattgacactcatgacattcttcttacctacctcgaggtttacctcctgctttggcgccattagcgctgtattaagcgtagcttcgtccattccggccttggctatgacaaaattcttatttgcagagcggattccggcttctactttcagacgcagttccatgttctcacgaaccagatccaggaactggcgcatcagttcgtcacgcttatctttcaaaagcttatggcctttgacggcagtgactaattttctctttgtcttggtcaactccatacgggtaggagtcacctgcgtagatgccatctatcatccacctccttattcgctacatctcgctgcgggcttgcgccctatgcacctttacagaaatcccctttctcaagcacgcttgctcgaggatttctctttctccgctgtcggacgccgtgccagctcgattccgcttcgctacatctcgctgcgggcttgcgccctatgcacctttacagaaatcccctttctcaagcacgcttgcacggggatttctctttctccgctgccggacgccgtgccagctcgattccgcttcgcttcttctcgctgcgggctcgcgccctatgcagctgaccgaaagcagccgctcgcaagcttgcttgcgcgtctgctttcactcatctgcgcacggcttactgcttaccataatataaatctaagaatttgtcgtcgattcgttttaattcggctcttggcagcatggagaggagcttccagccgatttccagcgtctcttcgatggagcgatcggtgttgtagccttgcgatacatactccttctcgaatgcatcggcaaacttcgcatagagaaggtcaatctctgtcaaggcggcctcgcctaagatggtcataagttctttcgcgtccttgcctcgcgcatatgcggcgaagagctggttgagcgtattggagtggtcagcccttgtcttaccttcgccgatacctttatctttcagacgggaaagggaaggcagtacgtcgatcggcggctgaacgccttttctgtacaggtcacggcttaagatgatctgtccctctgtaatgtatcccgtcaggtcaggaatcggatgagtcttgtcatcctcaggcatggtaaggatcgggatcatggtaatacttcccttcttgcctttctgacgtcccgctctctcatagagggacgcaagatccgtgtacatatatccaggatatccgcgacgtccgggaacttctttacgcgcggcagatacttcacggagggcatctgcatagttggtgatatcagtcaggataaccagtacatgcatatccttctcgaatgccagatattctgctgccgtcagcgccatacgaggcgttgaaatacgctcgatagccgggtcatttgccaggttgataaataatacggtcctgtcaatagctcctgtttctttaaatgattcaacgaagaagttggattcctcgaaggtaatacccatagccgcgaatacaacggcgaagttctcgtctgttccgcgaaccttggcctgtctcgcaatctgcgctgccagattggcatgcggaagaccggacgcggagaagatcggaagtttctgtccacgtaccagcgtatttagtccgtcgatagcggatacgcctgtctggatgaactcctcagggtaacttctggctgccgggttcataggcagtccattaatatctcttctttcctcaggcagaatctccgggccgtcatcgatcgggcggcccaggccgtcgaatacacggcccagcatgtcgccggatactcccagttccatgcttcgtccaaggaaacgcactttactgttgcttaagttgataccggtagcactctcgaataactgaaccagagcatcacttccgttgatctccagaaccttgcagcggcgtctctctccgctggcaagctcgatctctcctaattcatcataagatacgttttctactccgcgcaccagcatcagagggccggcaacttcttgtatggttctatattcttttggcataattagaagtcctccttcccgaatgcacctgcgatctcggtatgcagttcatttaatatcttttcatactctgtctcaatatcagcatccagcgtatatttgtaacgcccgattctctctcttacctccatgttgatcaggatctgcatagaagcgccttttgtcagcgcctcggaagcctcctcatagaacgcgagaaccagtttcatcatcaggtattgcttcctcagagaggtataagtgtcaatctcatggaaagagttctggtgcaggaagtcctcacggatggatcttgccgcttccatcttaaggcggtctgtcggcgacagcgcatccatacctaccatcttaacgatctcgtcaagttctgcctcttcctgcagaaggctcatcatcttctggcggtcttccatccagtccccagcaacctcgctgttgaaccagtctgccatattatcgacatacagagaataactggtcagccagttgatcgccgggaagtgacgcttgtaagccagagccgaatccagtccccagaataccttgacaatacgcagggtcgcctgggatacaggctcggaaatatcgccgcccggaggggatacggctccgattacggacagcgctccttctctctggtctttgcctagtgaaatcacatgtccggctctttcatagaactgcgccagacggcttccaagatatgcagggtatccttcctcgccaggcatctcttccagacgtcctgacatctctcgaagggcctctgcccaccgggatgtggaatctgccatcagggctacggaatatcccatatcgcggaagtattccgcaatcgtaatgcctgtatagatggatgcctcacgggcagcaaccggcatatctgacgtattggcgatcagaacagtcctttgcatcagtgactggcctgtcttcgggtctttcagttccgggaactcgttcagaacgtccgtcatctcatttccacgctcgccgcagccgatatatactacaatatctgcctcagcccattttgccagctgatgctggattacggtcttgccgcttccgaaaggtccgggaacggcggcaacgccgcctttggcaattgggaagaacgtatcgacaacgcgctgtccggttaccaatggcttctccggcggaagtttctttacatagggacgtcctttacgaaccggccatctctggagcatcgtaagttctttgtctccatcttccgttgcaactactgccaccacgtcttctactgtaaattcgcctgatttgatctcttttaccgtacccttgattccataaggaaccataatcttctgctgaacaacgatggtctcctgcacggtgcctaatatatcgcctgcttctacctcgtccccaacatttgcaaccgggacaaattcccatttcttgtctctcttcagggaagcaacctcaacgccacgctgcaggctgtttcctgaaaccttcataatatcgtcaagcggacgctggataccatcgtaaatgcttgcgataagaccaggcccaagttcaacagacatcggaacctccatagattctaccggttctcccggtcctaagcctgatgtctcctcatatacctgaattgatgcctcatccccgtgcatctcgatgatttctccaatcagtcgctggttactaacacgtacaacgtcgaacatgttggcatcccgcattccttctgcgataaccagcggtcctgctacttttttaatcgtacctgtactcatttggacgaatcacccacctttccttctttattcgtttccaaagataatatcagatcctactgcctgttctacggacttcttgacgccttctacgccggctccggtattgccggatattcctggtatctggataatcgccggaacggccagttcctgatatttctctatctcatgttttaattcttcagccagagcctcggtaacatagacaatcccatagtccccaagggtgagctgatgcagtttttctccggcttcctcacgggtgcttactggaaatgtatcaagacccaatgtagcgaaaccgtaaatactgtcataatcgcctagtactgcaatcttatacatacatctcccttaccctttctcggattgaatcatccggtaagtcattaagtttgccggaaagaatgattcgtaccgtctttatttcgttctgtctcgcaattacataggcaatcaccggccctatggtaaatgcattatatttctgtggactgatagtctgaataatccggttatcgcaccagcgctcgaatgctgacggcgagtcggctaacgcctccgcgccttgtgcataagccgttcccagcaggtattcgcggatcgcgtccattcccgccagggctgcctttgaaagctggtctacattgatactgtcacattcagccattgcccgcttcataaaatctatcgatttcgcggttttctgtgaacgcacggcaatcttgatatctgcaactcctaccgtggattccgcatagtcgcggatgatatccgcctttgcttccttcccggccgcatagattgcctcaagcgctgccttatcgataatgacatcgcacaactgtccgtctctggtgtgaagaagcgattcatatgcttcttccgccgcgtgctgcatattcgaaggaagtcttccgaaatccttctcttttatgatctccatcatggcacttcccggaatcggcacatcttcatagaatatatgcctgttcttttcctccgtgcacacttccttgattgcggccttcagattatggaaaagttttggataggtaagcacgtcaaaatgttccatccctatggacagttccttaacgacttcccatatcttttcttcttctctggtcagcatagcctctgcattaccggatgtctcagagtctccccagcctttctcttccaggaactgaatacactgctcatagttctggcatgcaatcagctggtcaatggtgctgttggaaaataaagagacttccagggcacgtatccgcgcaaccgcgtaggtatattgttcactcatgctgctcctccaatctactacgctttataagaataataagtgatgaaccttatcggacaactcatctctttttgcatcaaacattgcctgtaatgtgcagttctcttctataccgccataagcaagaatgaatccattctctatattcctgccttcttcagataccgtcaggcttccattctttgattcggcagcctttttcacctcatcctggaatcctgcaggcattctctttaaatccctggctgaaaagaatatctctccatcctgcggcagcgcatacttgccaagcatcttaagcagcatggcaaagtaagcatccgcctccatgccagtcagcgactcatacgcctcattcaggacttcctttattacatcctgctttgcagcaaggaccttggtccttctctgcaaatcgatcgaagacgctacccgctctttgtagtttgctatttccgcttcggatttctgggagatgctggcctgtttcttttccgcttcagcctttgcctggctcataatctcttcggcctgggcctttgcttctgcaatcttgctgtcagctactgctttcgcttcatccaggatctgacttttcattttttctaatccggtcatcgcccttgcactccttttcttaatttcctagtttttaccgtgtatcagatatcctatacctgaattgccgttactgataagatggaaataagaagtgccaggattgcatatgtctcaaccattgccgggaacagcatggctttaccaaactggtccggcttctttgcaatgatcccgattgccgctgctgcggtctgtccctgggctcttccggaaatcaatccaacgatgccgatcggaagacatgctgccagaatcaggagtcctgtctgcacgctgatttctgctgcacctcctccaaggagccctatcttggacaaagtgatgaatccaaccagcagtccatagattccctgcgtaccaggaagcagctgcagaatcaataccttcgcgaatttgcttgggtcctctgttacaactcctgatgctgcctgtccggcgatacctactccaaatgctgatcctgctcctgccaggaaaactgctactgctgcgccaagtaatgcgtatacaagtcctaaattactccaaatactcatgataaagtttcctccttaatatctacatattttgtatctgattgaaatggttcgaaaggtcttcctccgccttcgtagaatttgccaaaaaactctacaaactgcagacgattcgtgtgcacatacgcgcccagcaggttgattgccagattcagcgtgtgtccaactataaagacgacaacaaataggattgctcccacgatgccttttccaaacatgcttcccatctggtttaccacggaagcgataactcctgtggcaaggccaagcgccagcagacgcgaataagacagtacatcgctgagccagccggtgatgttatagatatcatatgctccaagcgcgatcctgagcgccggattcttgttggcccttccggacatcagaagaagtcccagtgctcctacgatcgccaggccttttgccagcatgctgacggccggcgggaaaacgatctgcgtctgtgcgattgatgcaaatatatccgtaggaagcagcatcagtatcaggccgatcaaaaatgcgtaccagagcaccacatcacagaaaaagtctaaaatctttccgtcttttaccagcatatatcccttgatgcccagtcctacgaacagatggatcagtccaaatgccatagaatagatcaaaagcctcatcggatcattcagcggtgcaaaccacaatggcttgatggtaactgtccttccaaagaatgtccgggacaccacatccaccacgtctccaaaatatcctccaaacagaacgccccagactatcgtcgagatgccgcagaacataaacatcttgattgacttatgcatacccttgctcatccgggggaatttcttcagaaccacgaaacaggcaattgcgataatcgcgccatatgcggcatcagataacatcattccaaagaaaaatacatagaaaaatgacatgatcgtcgttgggtcgaattcacccttatggggcagtccgtatgattccaggacgccttccacgctggatgaaaatgcgttattcttcaggataatcggcggttcttcatcttctttcaagtcctctacatccaggacacagtcatagcgttccccaatggctttttcaattgccggcaccgcctttgccgctacatagccgctcatgacaaatgtcctctgcgactgtggaagagttcccagcacttcatacttctgtgctctcatgcggaagtagtctcctaccagtttcaaatcctccctgctatctgcatagcttctgatctcttcctcagttttttcaatctcattattcagtttttgaatctctgcgataagatccgccttcttcttggcaggcgccttgtccgtaacctgcgaaggccttgcgaatcctcctgccctcaaagcctcttctaccgcagccgcttctgccctaagacaaaaaacagccaggtaagccgcatccctgtcactggagataatcttcacatccattgcctcaatgtcaggattattcacggcaatctgctcgtagacagattccagggtcgtctccgccggcatagttccaagcagcatcgacaccttccccgtaccttcgaaattcattggaacatccaaagaaatccaaggttcaagcgactcaatctggttttccagtttcagaataccggctttgctctccgctatctctttatttttcgatatcagcagattagcttttgagacaatggcctctttttctgcaaccgctttatcaaattgctcctgttcgactagtttcttgccctccaggcctgatagcattgaatgcttctccggagcgtaagtttcaagaactgccagcgcctgatccgaaagctgcgccttcttctcaaacctctgtctggcattcaaggtatccatcttctcgaagccttcctcgtcttcggcaatctggttcatttccatgactcccattgactgtatcttctccaaaatggccttacggtctttctttagcgcgcagatactaattctttgcatctgcaatactgacatagccgcatccctcctttactcttattctttttgcccaaatatgcaagtatcagacgagttctgcaattacggcagacaccgtctcttcttccttcgccagcgcagcctccctaagagatgcaatttccttctccacatcggccaaagcctccatcgtcgacttttccccactttccttcgctgcctttagactgtcttctgcctttgcctttgcatctgcttcagcctgttctttgatctccttggcttttgcagaggcttcttcaaggattccggtacattcggcgtctgcttttcttacgatttcctccgcctcattttccgtctccttgatggttttaatggtttcttctaccatctgttcaccacctctcttgttgttgtaactctcctgtagttacgattataatatgattccaaataaaagtctagaaatttattgttttttcatagttcccagaccgtactgaacatacaattaaacgaataatcatacaattgccttttttaccattccagcctgtgcagatggccttccagatccatccccgcaaacgcattctgcctgagcgcctcatataaaacgattgccaccgagttcccaagattcagggaacggatatccggaaccatcggaatcctaatacagtcatctttatgttttaccagaatctcttctggtattcccgcgctttctttcccaaacataatatagcagtctggctcatactcgacatccgtgtaggctttcgtcgctttggtagtggccatatagatcttcgcgttcggattcctcctgatgaaatcatcataatcaatataagtagtcacatccagcttatcccaataatccattccagccctcttcagattcttctcattcagtctgaatcctaatggttcgatcaggtgaagccttgtgttcgcagccacgcaggtgcgtccgatatttcctgtatttgcaggtatctccggctcatgcaatacaatattcaacatgctgcatcctcctttatgtaatattttaaagaaaacagataggcccgtcaatatacacttttggtaatgctgtattcatattttcctaatttcatatatttttaactattttgcccaaagcctgcctgttcttgaggtcacctgatgttcctgagccgccccacgaagtctcccagccgtccgatcgcctccttcaagtcttccagggaataagcgtaagatactctcaggaatccttccccgcactctccgaatgcactccccggaactaccgccaccttctcttcttcgaggaacctggtggcaaacgcttctgaactcatgccaaactccttaatatttgggaatatgtagaacgcgccaaatggctcaaagcagtccagtttcatccgtctgaattcatgaaccagataacgccttctctgattgtaggccacccgcatcctttcgacttcgctttcgcagttcttcagcgcctcaaccgcggcatactggctattggtgggcgcgcacatgatagcgtactgatgaatcttcaccatctgctctgcgattgccctgggcccgcagatatagcccagcctccatccggtcatcgcaaatcctttcgagaatccgttgattaccagcgttcgctctttcattcccggaagagaggctatcgatgcatgggcggttccataagtcagttccgaatagatttcatccgacaacacgaagatgtcatgttccttcaccactttcgcgacaggctccagatcttcttttgtcatgattgcccccgtgggattattggggtagggaagaaccagtatctttgttcttggcgtaatggactcttccagttcctctgccgtcagcttaaattcattttcctgcttaaggggtattacgatgggctttccgtccgccagtactgtacagggaagataggatacataactgggctgtgggatcagcacttcatctcccggatccagcatagccctcaaggctatgtcgatcccttcgctgcctcccaccgtcaccacgatttccgatgccggatcatagtctacatttatctttctccgtaaatatctgcctatctcttctttcaattccttcaagcctgcattagaagtatagaacgtctttccctgttccagcgcatagattccctcttccctgatccgccagggcgtgtcaaaatccggctcaccgacgccaagagatatggcctctggcatctcgcttaccaagtcgaaaaatttacggatgcccgacggcgccaggcctgttacttttttggataatggatctctcatcatggcgtcaccggcatcctttctgtcttattctttgtccgcatcaatgtcccgtgttctttatatttcttcattataaaatgtgtcgtcgtgcttatgacatcctcaatcggagacagcctgccagatacgaatctggcgacttcctgaagcgtctttccttccagtgtaaccagaagatcgtatcctccggatatcagatagacggccgtcacctccggaaaattgcatatcctttccgccgtcttatcaaatcctttctctctttggggcgtcacgcggacttctatcaatgcgttaacccgttcttctcctgtcttgtcccagtcgatcagcgtgtgatacccgcagatgatcccctccttttccatgcgggcaatctcgtttgccacatccgcttcatcagtccccagaatgactgccagttcgcccagatccactctgctgttcgtctccatatacatcagtatctgtttcctcatctctttcatcttgcctgcctccgttgaatagtttaaggatctcatccggtgcgggacggtcaatatagcgcacctcttctccattatgtataatcttatcattattatccgtcagccgcccgataacggatgccttgacctgcctgctgttaagcgcttctgccagtgcttccccatcatctgctatgatcaggaggctccccgcggaagccagctggtagggattgagccggtagtgctcgcaaacctctatagtctcctgaaggatggatatctgcttcatatccacggatatcccggccgaggcttctttcgccagattccacagggctgccagaatgccgccatccccgatctgacagatggcggacgcgccacaggcccttgctatgcctatctcctgccgtgcgaatatctcctgtcggtaagacaatatctggttaaggaatgccggcgcgaaccgctctcttaattcccgttccttctccattgtgatctggagcatgccatccatgcccacccacttggtaaggacgatctctcccttcgccggaaccggacccttgcaccatgggtcattcttcgggactttagcaatcccgctcacggccaccatggggaaattaaccgccgaattcctttcgctctttatctccagcagttcaatttcctgctcgcggcaggcgctctttatgtttttttcaattgtatgtatcttggatttgtatgcgtaaggtggaagcgcgatccgcacgcctacgccaggatgcgatgcacctgccgccgccatagagttggcgacggcagcaagtgcatgaattccaatatatttggactgcccatatacggtagccgtttcatttatcaagtatccagtctgcgtttctagtctcatctttgattcctctgcttattaatccattactgtgccggctgtacctgccctgttgattcctgggaggattgttcctgcccgcccgtgccttgggatggctgagcctgcaaggaccgagcctggctgatggctgcgtcgatcttgcctttgtcctgggtggcaatagcattctgtaccagaaccttggcctgggcgttatcagttttggtccctatctcaataatctggtcagacttctcataagtgctgttattgatcacatccctgctcacctgttttccatcctgataaacgatcttccaaagttgggccgtcttgcctgtatgcgggcttccggcataattcaagcttccgagcgccgcatccgagttctctttataggtgaccccataatcttccgtggtcaacgtctcgctctcaaactccacggtccgccccggcgtcctggtctccttgccatagatggtgaaacgcagctggttggcagcgtcgatctctccggcaataaagatcggagtatcataactattcttaaacacgaagtccagatagtcgccggcaatggctgcatccctggacgggtctacatatgctacaagcatggagtgaggatatcgttccaccacttccagttctgcataaagcacggcattatatagagtggtagacacctggcagatgcctcctccgaaagaatccactacctgcccattctcgtaagatccggccggcacgtatccgtgctcttcatcataaggcgcggtcctgtcatggacggataactgctctcccggcatcagcacggagccattaagaagatccacgcccgtcttaagattctgccagcggtctcctccgcctgcatccgtgaaaaatgtccccagttcatcttttatcgtgctcaagtccttcttcgtcacggaaggagattcttttatcagggtcatctttatggtaatgcctttatgcttccatttttcattcagatatttttccaatttcgctgtcgatgctttgatatctacggtctgtccgtccttttccttggtaatcttaaatccgtcgccgtcttttttaatcttggcatccaccgcatggctggcaagtggaaccaccctatcctctatgacagcctttgactttttatggtccaggacaaactcctcgcccagcaccattttttccttagatagtttcctcaactgccggtagcgcacccatagcctcccctttttcccataggagacagcctttttggtcaccttgtcgatgtcattatagtgaagtcccagttcttccagcgtcgctgcagcctttttgtcgtccactttcatggtcacattctctttgcggtcatcctccagatgctttttcaaagcctccttggcctctttgtctgtcattcctgacacatttacgcttccgatatagatattgtcgcagatcttatccgccggaaactttgatacataacggtaaagcactccataagatatggcaaagatgatacatacgcatacgaaaacaagaccaaaaaggacttgcctccttcttcgtctcatcctcgacatccgtttgctttttttatttccctttctctgacttcctgcagccatcttattctcccatacccctttgctttacaccataagatatggcactaccatagttgcgatcatagcaataatcactaccatgattacgattgcaatgattcttcttgtctttttattgttaaaattcatccgactaccttcttttcatatatttctctacattttatactctttacaatatttttgcaagaaacattcctcacatcttggactgcgtgccgtgcatatcgtacgtccaaacgtaatgatctgtatattgtacaggatccaatggtctttaggcagctccttcatcagatcctgctctatcttttccgggtcctgattctttgtcagcccaagccggttcgatatcctttttacatgagtatccaccactacgctgggctcatgatagatattcccccttatgacattggccgtctttcttcccactcctgcaagggacgtcagttcctcaaggctctttggaacttcgccgtcatatttatccacaatatccttcatgcatgagatgatattctttgctttattatggtaaaatccggtaggcttgatatcctgttccagttcttttaagtctgcgctggcaaatgctgaagcagacggatacttcttaaacaggctttcggtaacgatattcacccgcgcgtccgtgcactgggcactcagcatagtggctatcagcagctgccaaggcgtctcatagttgagatagcatctatattccgttccatactgttcatccagtatgtccagtatctggcgtgttcttttcttcatcttatctcctcgttgcttctaagaaattctagttctatcatacaggttcttgcttcctggttcaatggatttctttctttatagtcaaagaggatgtatttcccggtaatggaaaagtactccatatgggtcatcttgcgcatctgattcctgtcatatggtccataagacggaaggtactgcctgtttctttcttctgccccgtagaaatgcctcaatatttccttagacactttatattctcccgcaaattctgggcgggtcttggcattttccctcagataataatcataagtcagcagttctctataatagtcttccctatccgggtagtttttaacaataaattccagcaaaatagcatacctggcgcttcttttatgctggacgcctcccagtcctttctcatcatagaactccttcagcttatcatacaactcaaacgcagaatcgtacgcctcctccagcgcatccaaggtgtgggtaaactgcctgctgttataatagacttccaccatctcctcgatgcctttcaggcggatcacatcctcataggaaagccatctggtgcaaagcacttcgtaaggaggcctgcttttgtgcagcagaccgtaagattccttctgttcctccatataagagcccttcagcacctttaagaatcccaactgcagctgttccggcttaagggcatacacctcatcaaaggagcgtgcaaaacgatggatgtcttcataaggcagccccgcgatcagatccaggtgctgatggatattcccattcttctgaatcctgtcaacaacgcattttacattttcgaaattcatcgtcctgcggattgcccgtatggtctccggattggttgattgaatgcctatttccagctgcaccagccccggccgcatatgttccagtatctctaactcttcttcgttcagcaaatctgccgctatctcaaaatggaaattcgtaatccccctgtcgtgctttgcaatatatttccatatgcggatggcatggtcatgcctgcagttaaaggtacggtccacaaactttacctggggcaccccctggtcgataaaaaactgcagttccctctccaccagcccggcatccctgaaccgcagacgcttgtccacggaagacaggcaatagctgcacgaaaatgggcaccccctgctgctctcatagtagacgatcttatgctcgaattcttccatgtggcggtagacaaaggggatcttgctaagatccatcgcctggcgccatggattctcgacaatccttccgtcttctttccggaaggtaattccctccgtccgttcaagtcccttgtcgccttcctgatccttccagattctaaacaactgggcaaatgtctcttccccctcgcccttcatgactccctttacctgatgaagccgcctaagcacgtccacggaatcataagacacctccggcccgccaagccagataggcatatccggcctgatcttccccagttcctctaccagttcttccacataatccagattccatatatagcaggaaaagcatgcaacatccggcctgcgcctgtagatatccatcaggatgtcatctttttgctggttgatcgtatattccgccaactcgatctcccctcgctttggcttatgcaaaatccaatccattgacttggcttccgtataagccttcaggctgtatattgccagattcgagtgaatatacttggcattgactgctgctaataatatcttcatcttctattctccatttatcccgtcgactttttccgacctttcttactggtccttcgtctccccgtccttctgcctcttcgcttcatcaatggcttctgccctctctgccttcttatcgtcttccaacgatacccggcccagcacttcgccgtcgatcagtctctggccttccggaacctgccaggccagaattgccactattattacattatagcacaccatccgcacataatctcatggggattgacaatttccccaaaataggttaaacttaagactcgtgcagccggggtgttagcggtaccttgtacctgcaatccgctatagcaggggtgatattgcgcggagggcacagttctgtagagctgcccttgaaaagtggcgttgatgcctgggtcttacgcgacggaaattcatgaaccgtgtcaggtcgggaacgaagcagcactaagtggaaccttccgggtgccgtgagggtgcctgggctgagttaactgtcgaggtaacgtctatggggccgggttcgaagcgcaatgcacgaaaaataacgcaaatacaaaaggagtcatcgctttctctgcgattactccttttttgttctgcggctccgtaattctttaaagaagtccttcatcatctggctgcattcttcttccagcacgccggttgtcaattctgcctgatggttgaattccgtcatctgcagcagattcaggatggatccggcacatcctgccttgggattcatgcatccaactaccactctgctcatcctggactgcacgatagcgccggagcacatctggcatggttccagcgttacatacatcgtgcattcttccagtcgccagtcacccatcttcctactggcttttctgatggcgatcagttccgcatgagacagcgtattcttatcggccatcctccggttgtatccccttccaattatcttatccttataaacaatcacacagcctatgggaacctcccctatggcataagcctttctagcctgcctgattgcttctttcatgtatttctcatcaatactgtgcatgcttctctctccgtctttctgcaattatcatcgaccgccaggtgtcgctggtcttttcacgtaccggcaccaatagccgaattgctcctgaccattcttttcatcgtcggccagcccgatatccagatcatcgctggggatgaattccgggaatccgcatgctgccgcagctttggcttcctgaggatgataaattccgggaacgccaagcctcagtctctctccgtcatcaatcagcgccagatggtgatagttatagtatccatggagcaggaaattattgttggaaagcttccactcgcatcttggaagcctggccagttcgtttctttgaatcttcgtacactggaactgcgaggccggcatctcccgaccatcccggggcatatctgtctgcaattcccccatcccacccggccgtgttccggctggctctccccgggttcctgcctcttgctccatattcggccaaacccttcctgcccgtgattcctcttgcggcattgcctcttctgcctgtggctcctcttgcggcattgcctcttctgcctgcggctccgcttgcggcattgcctcttctgcctgtggctcctcttgcggcattacctcttctgcctgtaattcctcctgcactgactgcacctcttcttccggcgcttcctccgcccgcagttcctcttcttgctccgcctgtgcttcttctgcctgcaccgcctcatcgtgaagttcttcttgctcattgccagaatcttcgctcgctgcctggccctgcttaacctctttaggggaccataccctcatattgtttacattcaccggcatgtcatcccacaccacggcatatttatgaccggattcattctccaggatgactccgttgatgcgccggaagttctccggaactccggtatcttctttcgtgtagtacagttgataattaatagcagggttcacattgtccactgtgccctgccagattcctacacatccgtctccttcttcgtagaacagatacaattgcagccttttttctcctttcatatgcaatcctttgccgtgaatatgtatcacgcaatcttcgtctccctgctctactttgacaaatcctacgttgcgtagtctccttccctgttcatattcgtataagtaacgaataaaacgcttcaatcttccacttccaatcctggttatttatcacaatctattccccaggattccaaaatatgatagttatataattgcttttaactcatgataaagcctttttgcataactgtccgtcataccgcatatataatccgtcaccagaaggagcctcagatacagtttttctacctcagacttcccttcggcgtggtaatggtatgcctttttatagttgctggatataaaagataccatacgctccccgatagagtccagcttgcgcgtctcatcatcataatagacaatggctttcataaacttgtccatcaggaagtcaatcatagcagcctccgccacttccatccgatagatagtctcagtcaggaacacttcttcaaaagccatgcttcccagaagatccattaacttttccgcaaacgtcccttgaaacaagtcatgcctatactctccctccataatttcgttgtaatgacaggtaaatccataagtcgcacagttgatcaggaatccctgaactttgataatccagttcttgatggcatactcttccggcttttgcatctgcatttccctgcctctggcatatagctgctccagtttgtcagccgggcggaaacttcccatctcctcatccggatatctttcctgcagcgcggtcagttcttccagcagtttatggtaactgatgaatcctttgataaatgcgtcctcgatatccgccgtcttatacgcaatatcatccgcggcctcaagaataaatgtaagaggatggcgtctgccattcgtccccgtctctgccgctatctcttcaaatatctcctcatcggcaaaatagtatcccatcttcttgtccttaatatctccggacttctcattgatgccggtagatggcaccgggtattttacgatcgtatttaaaagcgcatacgtcagattcattccattctcatctacaagaaaatgaagtttggtcaccagcctaagcgcctgggcatttccttcaaaatgatagaagtcttcccgcatctgcggggtcagcgccttgtcaatcgtcacgccatggaactccattcttggcaggtttctctcaaaccattctcgaatagcgctctccccaaagtggccgaacggcggattcccgatatcatgaatcagccccgcgcactgaagtatgctgcatatatcttctttcatcctgggcgtgaaactcgggtctttcttatataccaatatattttccccgatgttctggcccaatgacttcgcaaacgaggatacctccagcgagtgggtcagccgcgtcctgataaaatcgcttttgtccaacggaaagacctgcgtcttgtcttgcagcctccgaaatgaggcgctgcctattatacggtggtaatccttctcgaattcgctccgtaagtccgtattctttccatatcgattcttgccggaacttccccggcttctctttgtcgataataactgttcccaattcacctgtcttcactcttttctattataccggctaatccagatagatcggcggttcataatctttcccaagcaaggctttcttacgctcctgatagcccaggaacgcccactccgtcatatccgtccatttgtggtcgctcctgtcatatacctggacgtatccgatgcggttcgggtgcatgcgcacgctgttggattcatattcccggccggtatacggattaacatctccccggatgcagtcttcttcctcttccggtgcccgggcctcttctatctcctcctgcgccccggcatattcgtcctcatattcctgcgcatactcttcctggtattcgtaagcaccctcttccacatattcctcgccattctccagtgttccttctgtcaagtctccggcatcatcctcttttgccagattctcttcctcatcgttctttttctttcttctcaagagataggatttccagccatggctcttcttctcccgttcttccctttcttcccgggtctctcttttgtctgccttattctcttcttcaatcgcagccatctcttccagaagttcttccaccggagcctccagaggcggcagttctccggtctcctgctctatcatggcatccagtttctcatggatatccaccagttcgccgatggtaatatccctttccgtagccgcgccttccgaagcgggcgcctcctgtgcaggaacctcccgtttctcttctttttgcacgactttagagtcatctgccttgtcagatacttctgtggtcctgtctggctctatattatttgatctttctgctgaagcgccgtcatcaagaatattcaaatggaacgggcagccaaggatctcggcaatcatgcgcatatcctgttcctggaaattatcccggcccagcctctgcgtcagattctggcgggacatcttcttcccggtatgtgcttctatggtctctgccagttccttaatcgtcatgcccttacggcttaagataattttgacctgctccccaaatgttaaatccagcataacttgtcctccttattcaattaatctaatatactcacccgattggtctcatctttcgtaaagtaaactcttttatttcttgataaacctaagtttttcccttttattattctaacaaatacttaaaaacacgtcaaccttgttatatccgcagtaaatggcagatagcctccaaggcgcttctttactagtgtcccatttacatagacttccgcgcattgggcttgcttacaattctattgcctgaagttcccctatgtccgaatccgtggtacagactgcaattgcggcattgaccccctgcatccgatattccctgcagtaatatgcatccgcatattcctcaggcttcccggcaatcacaggcctcccctcctgatcccatccaatctcataggaacgcatatcgatagccatgccctttctcgtggctttcatgaaactttccttcaatacccagtagcggtaaaacagccaggtcttacattccggatctttcgtctctgctatatggcgatattccccttcgccaaagaaccgtcttgccactgatagccgtagctcttttacctcttccagatcgcagcctacttgggcctttgccgcatcgctataggcgcacagcacataatccccggaatgggaaaggttgaatacagcctcttgcggcacttggccggccttctgtatcttctcccacagaatccatgctcccacgctccttgccttatcttccttaaaccgcagtttatccgccttttcctgcctccaggcaggaatcttacggtagtatgctccatagtttttttctattaacaatggtgtaatctttgctatatatactcttaccatatccctaaccattccttgctgtttgaatttcttctattataagagtgtatggaataatttacaaggtatggctcccacctatttttcggataaaaataattttttataaaaagaggttgacaactaaatgcacatgcgttagtatatccttagtttcacactttaaacaactaaagttttacagtgcgaatattttacagtatgaatattattcagcactggtaatacatatggaggatgttaacgatgattattgtattgaaaccacgcacaacaaaagaagatattacccgggtcgagcagatgatcaaaaggaggggcctggacacccacatcgtagaaggccaggaagtgaccatcattggatgtatcggggatacgaccaagatcgactctaaaccattcgaagtagactcttctgtagataaggtcatgcatgtgcaggagccgtataaactcgcaaaccgcgcattccaccccgaggactccatcattgacgtctccggagtaaaggtgggcggaggaaatctggcattgattgccggcccgtgttcggtagagtcctatgaccaggtgcttgagattgccaaggcagccaaggcatccggagccaaccttttaagaggcggcgcgttcaagccaagaaccagcccctattctttccagggacttgggctggagggcctgaatatcctctgcgaggtaaagaaagcagtagggcttcccatcgtaacggaactgatgtctccggatcatctggacgtcttcaacgaaaaagtggatctgatccagatcggcgcacgcaacatgcagaactttgatcttctcaagcagctgggccaggtagatcggcctattctcttaaagagaggcctcaacgccacttacgaagagtggatgatgtccgctgaatatatcatggcttccggaaatgagaatgtaattctctgcgagcggggaatccgcacctttgaaacctacacccgcaatacgctggatctgcaaagtattccggttctgcgcaagctgacccatcttccggtgattgtagacccaagccatgccggaggcaagtggtggctggttgaatctatggcgaaagcctccatcgctgcaggagcagacggacttatggtggaggtacacaatgccccggaaaatgcgctgtgcgacggcgcccagtcattaaagccccggaaatacgacgaactaatcaaggaagtctcccagattgcccaggtaatcgggaaaagcatataataggagagatctatgaaacttatggtaaacctgggaaaggacagctatcccctctatatcaaaaataacatattgtctcaggctgcctcttatatcagcgaagtgtttaccggaagacggattatcattatatccgatgatcatgtatacccgctttacggcagttcgctcatgaaaaacctttccgagcagtatgagtgccaccagctggtactccctcacggcgaggcgaccaagagtttcaagtccctgcctgccatatacactgccatgctgaatgccaagattaccagaagcgacctggtaatcgcattaggcggaggcgtcattggagacctggccggatttgccgcttccagttttctacgcggggtaagtctggttcagattcccacctcccttcttgcacaggtagactcttccatcggcggaaaagtcgccgtagacctgccacagggcaagaacctggtaggcgcgttctatcagccttcaatggttctgatcgatccgatggtactggatacgctgaatgaacgatttatcaccgatggcatgggagaggtaatcaagtacggatgcatcaaagatgccgatctgttccataccttggaatcacacggttctttcgaaaaactgaaggaagagctgcctgccatcatcttgcgctgtgtagacatcaaacggatggttgtagagaatgaccaatatgacacaggagagcgtatgcttctgaattttgggcatacccttggacacacaattgaacagcatttcaactaccagagggaaagtcacggggaggctgttgctattggcatgtttcagattaccaagcttgctcaggaacaatacctgactgctcccgggaccgccaagcgtattctggatgtattgcagacttacgggctgccttatgaatgcggtctttcactccaggaactgacagacgccatagccttggataaaaagaatctcaataatctgctgaatgttgtcctgctgcgtgaaataggctccagttatattcatcctacgactctggactttttcaaaaaaaatataagaaatatataattatggaggaatatatcatgaaattagaaggaaaaattgcaatcgtaacaggcgcgggaaaaggaatcgggcgcgaggcagcgctggcaatcgctgaagaaggcgcaaccgttgtcgctgtagcgagaacacaggctgacctggatgagacggtaaaaatgatcgaagaaaaaggcggcaaggccgtctcactctccagggacctaacggacggacagcaggtacagtccatggtggatgcggtagtcgggaaatatggccgcattgatatcctggttaacaacgcaggcggctatccatccgagatctatgacaaggtaaaaaagcaggccatcaagatctgggaatggtccgaggcccagtgggatcagatcatcaagaccaatttaagaattccgttcctttgcatcaacaaggtagttccggtaatgatcaagcaaggaggcgggaatatcgtcagcgtatcttccagaatgggaagaatcgcttcacagatgggagcatatgcagtggcgaaaggcggcattatcacattgaccaagacgactgccatccagacgcaggagtatggcatcaaagtcaatgctgtctcccccggaattgtagatacgccaggacagcgcgtatataaccacaacgtaggacaggatgatatcaagatgggaagcgcccaggatgtggctaaggccatcctatatcttctgtgcgattctccggcggtaatgaccggacagtccatcgacctgttcaccacggtatagtcctagatacgaaggcatgaaatgtcagtttaacataaacctaccatatattcagcacatgctgcatgccaaggcttaccagggtgattccgatccagcaggccatgcccataagaatcggctttcctcctgtcttaaccaacttgatgatgtttgtgtgcagtcctatggctgccattgccatgataatgaagaacttggacaattccttcagcggagcgaacacttccataggcacgcctacagccgctgcaatcgtcgtgatgatggatgcgccgataaagaacaggatgaagaaagggaatacctgcttgatggatacctgtccgccaccctcttcttccgctttgtaagtccggaatacggcaagcgctaaagtgatggggataattgccagcgtcctggtaagctttaccgtaaccgccttgtcaagcgtggcatttcccagcgcatacatgctgtcccaggtggacgccgccgctgtaacggacgaagtgtcattgatcgcggtacccgcgaagattccaaaagcctcgccggaattctgggagaattccagaaacgcgcccagtgtaggaaataagattgccgcaagtacgttgaagaagaagataacagaaatcgcctgggccacttcctcatcgtccgcgtcaatgacaggcgccgtagccgcaatcgcggaaccgccgcatatagaagatccaactcccaccaaggtagatattttacccggaatatgcatcactctgtgaagcacataggcaattaccagggaagtggtaattgtagatataataatcggcagggactgcctgcccgtcttaaagattacctccagattcagcccgaatcccagcaggactacggcgtactggagtatcttcttagaagtatacttgatgccgctctccaatgcggacttgtccttaatcatcaacgtaattaccatgcccgcgataatcgcgatcaccgggccgccgataatcgggaacttcttgcccagcagccaggagggcacagcaatgcacaggcatgccagcatgcccttccagtttttcttaataaaatccatgtttatcctccactctatctatattctcgtttaaattcctagaaaataataccatgcgaatataatcatgtaaaattattattatttatttattcataagaatatgttatggtatataacataaaggattctaccattctattgaaaggagacgtcatgctagacaaccgtaccattacatttttaactgtatgcaaggaaatgaattatacccgggctgccgagaagcttaatatttcccagcctgccgtatcccagcacatccagtatatggaggactattatggcgtcaggctttttcgcttcatcggcaagaaactgatcctgacggatgcaggaagactgcttcagcgttcccttacagccttccacaataacgagatctacctgaaggagcagctgtccttcatcaacgataagaaacagacgctgcggttcggcgctacgctgacggtgggcgattttatgatcgcaaggcctctgtcagactttctctccaaacataagggcgctgatatctccgtcactgtggcaaacactaaggagctgctgcagaagttagattccggggaaatcgactttgccatcctggagggggattaccccaagaccctttataaccatcagccttatattatcgataactttattcccatttgcggaaaaaaatatccgtttgccgcaccgcctgcccggctgtccgatctgattggcgagcgcctgatcttgcgcgaatccggctccggcaccaggatgatcctggagcacatgctgattgaaaatggcattagcctggaggatttctccaatgtaattaccatcgggaatatgaacgctatcaaggatatggtcattgccggctgcggcattaccttcctttatgaaaccgctgtgctaaaggaactgcgatcaggaataataaagaagctggacttggctgactgccgcatccagcatgagatttcaatcgtctggaaaagggacaatctgttcgaagactcgttcaaagaactttttgaagatttattccaaatttgttaacaaatagttctcattttcatcacggttttatcacattttccttctatactaataattgttcagaagaacaacacttaaaaatctttttcataactttttcctcaggactgcactcctcccaaattgcagtcctttttaattggcaaatacgccaggagcgatgtctccttccagcgttacctcttccggagggatccttgccataatccggagcccatatactcctatttattcttataatcaataaactcttgtacattatcagccgtaacaggggagtgaggcacgcgcacatattgccctttaagttctggcacttcttgcttaggatcttttccttcggcacaggcgcatgcaattcccaggatgctttccgcctgccctctggcatcattcataaccgtcccctccatctctcctttgataatcttttccagtccatcctccgtcccgtctatgcctactacgatagggccgtttccgccggacatcccattctctaccagcgcttctatggctcccatcgccatctcgtcgttattgcttaagaccacttctatctggcttccatactggccaatccattcctgcatcaattcatacgcgggagaccgcatccagttaccggttccgctggcaagcttctccgtgacgatcccttccttcaagatcgttttcacagaatactctgtgcggatcagggaatcttgatgaacctgctcgccttccagcattacatactggagttttccatctccgttcttgtctatccgggactcctggctcttccaggcatctgccacgatctgcccctctaactctcctgcttccctggcatccgtccccacataataggtctgattccagattgccatatcctcctccaccggctcgcggttaaagaagataatgggaatgcctgcttccttcgccttatccacgatcactgccgctaccgtacggtctaccatgttcacgcagatcgcgtcatacccttttctgataaagtcgtccacctggtcattctggctgctctggctgttctttgcgtccgcaatattcacaaccacctttttccccagtttctcttccttatccttgattgcattctccagagaagcgcagagggatgagatgaatgcatcatcccctcggtatatggccactccgatctttattcccgtcttctcttccttcttttcagttcctgcacatccggccatcatagccgccagacacagcgccagacagatgctggctatcctggatttcatctttttcataacattccctctttactgaacaaatggaaacaacagcctctggttctctgtggtgtagatgctttttccgtcaataacggaaaagtctatttccctttctctgcctacatccggcagatctatgccaagcgcctttaccgtgcttaaatagccggcgctatattcactggagactccgatcgcgctgatctttccctcttcaagataagagataatctggttggactttccaatcccatagaccctcgtatcacctaaggcaagtccttccttcttgatctttccgcacagttccagttgaatggtgccaaacgtaatgatggccgatacgtccgtccttttcaagatctctggtacggttcccgcccatttctgctcagccgctgtcatcgaatattcttctactatggcattctgatccttaagatagtccttcactccctgacaggcttcctctatatccgcataattcatatccgacttaagcagcagtatcttcccgccgcttcccacatctttctgcaccttgcgggcaagttcctctcccatcttatggtagtctacatggactctttcgatatcctttgccgcctcatcccgtatccaggaattgatctggactaccggaaccttttttccgaccttcttaagttcctgcgctacttttttatcatccagcggctcgatcagtatggcctccgctccattctccacttccttctcaatcagcctcttctgttcttttgctgttatggctggatcaaaggcagttgccgtgatctcgcacttatagtctttggccgcctgatcaatcccctgcttggccgcctgctgggtttcatccaccgaattgcttcgatagagataggatatctgtcggatatgctcttcctcctgcctgggcagcccgtcccacccaaagatgaaccaggcgaagagtatcgcccctgctgctatcagaagcgcatatttacggttcttactcacgccggccacctccatcctgctccatctccccgacggttcgcgccggaatatagattcttatccttgttccttcatccggctcgctctccacttccatgccataattctggccaaagtaaagccgtatccgttcctgcacgttgtggaagcctatgcctgaacctttccctctgccggatttccaagtccctctcacaagttcgtccacctgctcctgcgtcatacccggtccattgtcttctatctcgatatacagggttgcctcatttacataagcgtggataaatatcctgccgtccccatccatatattccattccgtggtagatggaattttccacgaggggctgcacgatcagcttgatcgtggcgcacagcgccgcctccggctccatccggatctcgtaatcaaatttgtttttatatcgcaccttctgaatgatcagataattctcagcatgctgcagttcctgggccacggttatgatattcttgcctttgctaaggctgatcctgaatagcctggcaagcgcggttaccatgtcgatcgcgtcctcgtaccgctcgttttcaatcatccatatgatagaatccagcgtattataaaggaaatgcggatttatctgggactgaagggcagacatctcgctttttcgcttgtcctcctgttccttcactatatcgtccatcagtttcttcatattgtcagccatggactgaagcgtctctcccagatgccggatctcataagtgcctcctattttcaccgtcgcgttcaggttgcttttttccagcttcctcaccgaccgttccaactgcttgatgggatcggccaccctggaagagataaacatatttacaaaaatcaatatgataattcctatgattgccacgatccagataaactggctgttctgcatataagtcgtcgtaatatccgaagtcggggatacgccgatgattttccatcccgtatatcccaccgtcttaaccgtgatctgccgttcttttccttcaaacctttccacatggctgccttccgaatacttggctgccttcttgttattctccttaatgattcctccgtatatcaactgctggcgcgggtggtaaatcagttccccattgcggtcgataatatacacgtaaccggattctcccaagtccacgttcttgcagatctgctcaatcccggtaaaattcatgttaaccagcatcacgccgtgcacgatctctccatctttggtcatctctacagaacggcttaaggatacgacccagtgatagatattgtcagaattaacgaaaagattctctacatgaggcgctgaaaaatgtacattctcaatctgctcgttggcctttgtgaaccaatcttcagataccgggtcggcattcggctttgtccggcttaacggctgggcggcgatcaagtccccgtcatcgctgaaaatcgctacgctcaccagggaggacacgttggcatcatacagcagcttcatctggtcgctgacactctccatgctgtcctttccaaagtccgtattcttgatgatactgtaatacatggtattggaaatgctcatcatgttgtgaagataggtgtccagattaaggttcatctgatccaggacattcttgttattgatgatcgccaatcgttccgttgattttacgaacctctgggaaaagcctgccgccaccccgatcatgacggcgaccgagaccaacgtaaaagatagggacagtatgaactgcaggctccttttccggtatatattttttactttttccagtaaaccgattactttatccgccatagtattcctctgctattgttgatccctaagtcccttgcggtaccttgagggggatactcctacctgcttcttgaatgcatagctgaaataattcggctccgaatatcccacctttgccgcaatcatgtatgttttctcgtccgtctcgtccaggaggcgcatcgcctccttcatccgtacatccgtaagataggaaatgaaattgattccggcctctttcttgaagatcgtcgagaaataagccgggctgatgtgcaggctttcgcacagcgtctccaccgagaattccgcatccgcgtaattctcatccacgtactgcctggctttttcgaccagcatttttccggaagccattctttccttctggataagggttccaatctgccggcaggcctggatgaaccagtccttgatctcttctagggaatggaggcccagtactgcctcgatatagtccgacgcgcctttaaatacaacattcgtatccagctggtagacgttgactagtttcatcagtaccgtaaagatctccaaaatatacatctgatactggcagaacggcaggcgcgcctgctctaggcgctcaaagaaccggctgatctgcttctgtgccttttccatgttattgctctttacggcattcatcaaaagcctctcatcctgctcttccaattgcagcctggcggtagtgtcttccggctccatatccttaatgtatgcagcaagcctcccctcttttctgagcagggtgctgtattccagcgcattctgcgcttcttcaaaagaatattttaattcttcaaatcggccgtagattcctccgattccggcagtgacgtctgcgtccgtaatccggcacgctgccttgcaggcttcatttacctcctggcacagcagggatatctgggattcccattccaaagccacgatcagcactacatagttaagatataggaaactatacatctcatggtactttcctatgatatcttctgccgttctttttatagcaatcgggatcagttcctcttcacccgcaaagacgtttttcctgacaaaggaaagcgaattctcattggcagacaggactgctaccgtcttatgcctggcggaaagggacagcccatactggttcatcttaacctcaatctgccttggggtcatgcgcccttcgatcatgcttatgaaaaactgctcccgcagaatgggaaaactctcttcataactcctccttaaaattgcgatatccctttttcttgccagttcttcatccatcttctttttcagtttgatcagcgactcttccagctgtttggcagagattggctttagtatatattcttccacccccagattgatcgctttctgtgcatattcaaaatcatcaaagccggaaaacacgataatctttactgccggaagtctctcaatcaccttttcgatgaattccaggccatccataaagggcatgcggatatccgtcatgatgacatccggctggacctggtcagccttttcaagagcctccacgccattttctgctgccgccgcgacatcatagcctaactggtgccagtccagtttctggatcattccgtcccgaatttccagttcatcgtcaactaatagtattttataatattccatcccatcctcctgacggtctttaaattcagatactccaaaaactgccataataaacataagcttattatagcagtttttataaagcgactcaacaacgcttatttctttctgtatttcgacatatcaatcgcaaccgcgatagcaatgatgatacctttgatcacctgctgccacatcgggctgaccgcgatgaactgaaggccgtactggataacggtaaagatcagcacgccgcttacgataccgcttactttgccgacgcctccattcagggatacgccgcctacaacgcaggctgcgatggcatccagttcatagccgttgccatagttattggtggccccggcagtccttgccgcttccagaacaccggcaacgccgtacagtacggaagccagaatgaagattcccataatcgtcttgaacacgttgactccggatacgactgcagcttcccggtttccgccgatggcatacacgttctttccaaataccgtcttattcaggatgaaccataccagaaggacaaagcagatggcgataggcaccagcacggatatcccagggaaatctccgattgccagcagcttcttctgtcccagcagcacgaagtccggacgtacgccgccgattggctgggacttgttcggctccatatcaaagtacagggagttggcgccatagaccattacctgtacagccagagtggcgatgaatgggtgcatatcgtactttgctaccaggaagccgttcagaattccgaacaggccgcaggcaatcaccgcgattatgataggaacgatcaataccatatgcggcaggttcgggaagaaccggttggcatagtccgccgtctgcagcatggatgtagatacaaccgccgccaggccgaccatacgtcctgctgacaagtccgtacctgcgatcagaagcgtaaaactgatgcccagcgccacgatcatcttggtggatgactgggtaaggatgtccaaaaggaccgccagctgcatgaatctgggctggatgatcatgatgacgatgatcattaccagcagcgcgatcatgatcgcgttattcgtcaggaacttcttaccggttcctacggaaagttccacatccatgcctttatactgcctggcaaaacgctgcctcaggccgtagaacaaggccgctgcccctgccattatgacatagaggccaagatcatagaatacgccgggatccagaaaatagtacaggatgaatcccaggaccaccgctgccgcgccaatgattataaatgttgcgccatatttgttacgggcaactacttttcctttcttttgcatatatgtaatacctctctttcctctaagtcctactgcatgaattttgtcgcataattcatgacttgtacggaatccgcctctcccgaatcaaggaacccggttacccgcccctcgcacattaccataatccggtctgacattcctaatagttccggcatttcagaagaaatcatgatgatggatttcccttgttccaccagtttatgcataatcatatagatctcatatttcgcgccaacgtcgattcctctcgtcggctcatccaggatcagtatatccggatccgtcagaagccacctggcaagcagtaccttctgctggtttccgccagacaggttttccatattctcatccatatttggcgtcttcgtgcgcaattccgcattggattcctccgccgccttcagccgatcgccgtcccgcaggacgcccccatgggcatacgccttctggtttacgattaccgtattgtcaagtacagacagaattccaaagatccctgttgccctccgctcttctgtaagaagcgcgatgttctcccggatagcgtccctgggagatttgatcttcatcggcttcccatccttttctatagtgccttccacgatctcccttagtccgaatatggcttccaccagttccgtcctctgggcgcctaccaatccgccgattccaagaatttctcctcttttgagttcgaaactgacaccctggaaggacttgggcagaggcgagcataatccttgtacctttaagaccacatcatcggatggctggtattctttcggcgggaaacggttcgtcatatcccgtcccaccatccggttgatgatcagatccgtcgtaagttccgaggcatcccatgttcctacatactgcccatccctcatgatcgtcacttcatctgcaatctttaatatttcttccattttatgggaaatgtaaataatcgcgcatcccttatcctgaagcttgcggatgattttgaacagatgctgcgtttcattctctgtcagggatgaggtcggctcatccatgataataatttttgaattatagctaaccgcctttgctatctctacaagctgtagattagaggcagataatgttcctgctaatacctccggattaatatccagatctacttcttcaaacaattctctggtcttttcaatcattgccttcttattgaccgcgatccccttcatcgggaatctgccaagccatatattttccattaccggcctgaaccggatcgggtgaagttcctgatgaatcatagagacgcccaggtccagcgcctgttttgacgtcatgatcttttccggctttccgtccaggataatctcgccgccatcctcatgatagattccgaacaggcacttcatcagcgttgatttgccggcgccattttcgcccatcagcgcatggacgcttcccggccttactttcaggctgacattgtcgagagccttaacgcctggaaaaacttttgtgatattgttcatttccagtatatattctcccatgccctcactcctccttttaagccaagggatggaatcctccaccccctggttatgaatctgctgcattttctttatttcatataatcctggtaattatcttctgtaacctttacatagtcgatccagatatattttccgtccgtgatcggatagccgacattctcttcgttgatttcttttccatttactgccgcaacggccacattaacggttgccttgccctggttgtccgcgtcattgagtacggttccaagcagggagccttctttcattgcttccagcgccggagctgtcgcgtctacgcctactaccgggatatacttggccaggtcgctgctgtctttattgtacccttctgctttcaatgcctcgatcgcgccaagcgccatatcgtcattattgcagagaactgcttcaatcttgtcaaggctctgtccggtgatgaacgctttcatcaggtctgtagcctttgccttgtcccacattgccgtgtctgctgccagtttctctgtcttgaatcctgcctcttcgattgcttttacagaatattccgtacgcagggttgcatcctgatgtcccggctctccctgaagcattacatactggatggttccatccccattcttatctgcttccggatgtgctttaaagaagtcggcgataatctcaccggaaagagttcctgactgttctgccttcgcgcctacataccaaaccttgtcataactctgcatatctgcttcttctggctcgcggttcaaaaatacgattggaagatcctttgcctttgccttctcaatgatcgggcctgccgccgtacggtcaaccgggttgatcgccagcgcgttcacgcccttggtgatgaaggtatccacctgctcattctgtgttgcctgcttgttctgggaatccaccagttccagatctaccttggattctttggcctgatccgtcatggctgtacgcacgcctgtcatgaaagtatcgtcaaacttgtagattgcagacccgataagcgcgtctgattttgcgtccttcttatctcctccgtctgatgatccgctgtcgctcttcctgcatcctgtggccattcccgcgaccatcattaccgcaagccctgctgccagtagcctagttactttttcttttttcattacgtatcctcctccaaatgatattgtttttgcgaatctcttcacatttactatgatcccagtataaaaaaatggaagtggaaaatatatacaatatttttttgtgttatatcgatttttttatatgatatgtacaccttttacaatcttctgtacatatttttggatattatgcacaccttatttcaattttgagcatcccggacgctacattcatatacgaaaagggagccgtcgggttaaaggctataggcatcatctataaaaacattataaataacgattggtttttgatgttatcagctgatatacttgatgagtaatagtttaagtaggtgatataaattccattcaagatcacatcattatttaaaattggtttatcaccgtagagaaattcttcagataaaaaaggaggacacgtatgaaaaaaagatttttgagcattcttttggcttctattttggcagtaggcgcattaaccggttgtggaaatagcaacgagaagaatgacgccaaaaagcaggaaactgaaaactcatcaggaaagggcacatttacgattgcaatggggtataaaccgaattcgcttcaaccgagcgcgcaaagcagcgatgatctggtcagtgcaatccggcctatttatgaacctttatttgctgagacaaaagagggacttgagtattatctggcagatagtttagatatttctgatgatgggttgacttatacaattcatatcaacgatgatgcgaattggagtgatggaaaaccaattaccgttcaggatatcatgttcacaattgattatggtgtattaacatatggagggccgacctcatttacacaaatcaatggtaaagaagtaaaatttactaagaaagatgataaaactttagatattgtcttgccggaagtttatgacaactatgtaagaacgcttgcacagttttatccaatgccttcgcacgcatttgataatgatccatctaaaatagataatagtgactatttcaagaaaacagatatggcaacttcaggtgcatatacagttagtgagatcaatgaagatagttttgtgtttaaagcaagagatgattactatagaggaacaccgactgtcaaaaccgtgatcatgaagactatcggaagcggaagtacaaaacagattgaatttgaaaatggacagattgattatatgcgagtgacatcagcagaggatttgaaaaaatataaagaggcaagtgataaatataacttgtacagtgtttctgaagcgcgtcttaattatattcagctaaatccaaatggttcggttatgtccacattatccgatgatgcaagaaaagcaattttcatggcattgaataaagaagaaattgttgatttcgcatgggggtcggatgaacttgccgtcccggcaaacagtttgctgacgccggatcaatctctttataataaagattgcaaagggtatgattataatttggaagaagcgaagaaactggctgaatcatctggtcttaaaggcaaaacattgacttatatctataatgccgacagagcaaatatggaagcagtggcaacagttgtccagcaacagttggctgcaatcggagtaaatgtagaaattgaaggctgtgatacatcaacgtttttcccgcggttctttacgaaagcagacagtgaactggcaccaacatgggatatcggctcgaatggctgggattcgcagagaggaacaaactgtggtcagtcgatcagttatttcacaaatcgtcttgcggactgcggatttagtgatgaagtatctggtcttgcacagcaggcattaggtactgtggatgcagatgaaaaacaggaactttggaatgaaattcaggataaagcattggaagagtgttgggaatatccattaacctatacgaactatgttatggtttctcagaaaaatgtgtccggattaagtgattctacagttatcccggaatttattgattacttatctattcaggtagattagcaattgcatgaatcctgatagagatttataataaggtgaaagaatgtggtgtactcagcaatgagaaccacattctttctaattttcatttttatggagaaaaatagtatgtggaaattttgtatgaaaaagacattgcgagttgtggtagttatgtttttgatatcatttctttcctttgcagttatttattttgccccgggagatatatcatctatgtatattacgccggaaatgagtaaagagcagaaagcaaatattatggcggaactcgggttggataaaagtatgattgaacagtatatgtcttgggcagaacgagcgatacatggtgatttggggatgtcgttatctaataaatcatctgtttggccccagattcagcaacgtcttcctgcaaccatattattgatgggttgttctatgattttgtcactgttacttgcaataccgcttgggctatgggcaggtttaaaaaagaatacctggattgataatttattcagttccctcacctatatgggaatttctattccatctttctggtttggaatgctgttaataatattattttcttcggtattaaaactgcttccttcatcggggatgcatactgtaggcaatgtatcggcttttgatacattcaaacatttgatattgccttgtattacgctgagtatcggacacctggctatctatatccgttatattagggcaaacgcaatcggacagcttagtgaggaatacgtattgacagctgaagcaaaaggagattctcagatgaaaattctttttaaacatgtgttgaaaaatacacttcttccaattattactctaatgggtatgaatctgtcctcactagtgtgtggttcctttattgtggagagtgtgtttggctggcctggagtaggaacacttgctatgactgcaattaactcacgggactatccaattataatggcctatgttatgttatcgggatttttactggtgttaggtaatttccttgcagatttattatatgcatttgtagatcccagaattaaacggggaggtgttgaaagtggaagataaaagggaaataacagaagagttattcgaaaactataaagtcaatacttctgttcaatgtacggtcaaatatcagagcgtatggcaaaatattgttaaagaactgcgttctaataaagtagcaatggtcagtttagtattgttgctgttacttcttattgttgtattattggcgccgctaagtccgtatgatccttataagcttggtgtatcacaaaagcttcagggaatttcaacaaagcattggtttggaacagatgaatatggcagggactattttactcgaacattgtatggtggaagagtatcgcttaccgttggattcctgtccatgattatgactgttgttataggtacatccataggtgttttatcaggttatgttggtggaaagatcgatgcatttcttatgagttttactgatatttttctggctcttcctagtatgctattaatggtaatacttaacacttttcttaaacctggacttgccacacttattgtagtattaagcttgttttcatgggcgtcagtggcaaggataacaagagcagaaacaatgtcgttgaaggaaagagattttgtagttgcttcaagaaatctgggtgcatctaacatatatgtaattatttaccatattattcccaatattgtcggtccggttattgtagctgctagtctcagtgtagcaagtgcaattcttacggaatcgtctctgagttttttagggttaggcgtgcagatccctcgtgcttcatggggcagtatgctgcaaggagcccaggcacatattctggattatcctttattagctgtatttccgggagtcatgattctgatcacagtgctcagttttaatcttcttggagatatcttgagaaatgcattagaacctaagatagtaaattagataagggcgggaaaggaaatgaataggttattagaggtaaggcatgttgctgttgcttatcagacatataatggaacagtacagtcagtaagagatatttcttttgcaatggaaaaaggacagaccatagcactggtaggggaatccgggtgcggaaaatctgttacggctaaaagtattatgggactggttaaaaaacctggaagaatattagaaggaagcgaaatattatttaatggaatcgacgttttgaagttttctccagaggaatggaagaagtttcgaggaaaagaatgttctatgattttccaggacgctttggtgtcgctgaatcctacaatgaaaatagggaaacagattattgaaagtttagataatcatatgacggcagaaacaaaagaagacaagaaaaaaatggcagtagagatgttgaagcaaacaggaattcctgatgcggagagctgtttgaaaaagtacccgcatgaattgtccgggggaatgcgtcagagagttatgatcgcaatggcactaataacgcggccgaagctattgattgcggatgaaccgacaacatcacttgatgtgacaatacaggcacaaattctaaagcagatgaaggaactgcagaatcagatgaatatggcaatattgttaattacgcatgatttaggtattgtggctgatgttacagataaaatcatcgtaatgtatgccggaaaaattgtagaagaggggctctgccgggaaatcttttataatcccatacacccttataccaaagcacttctggaatctgtaccaagattagacagagaaggaaaacagacgctgagaaccattgaaggaagcattccggatatgacacaaccgcccaaaggctgcgcattttgtgatcgatgtagttatactatgaaagtctgtgctgaatatatgcccgatgaaaagcaggtatcagattcgcacaaggcatcatgctggttaatggatgagcgtgcaggaaggaggggtaagactaatggagaatcgtagaaaagtgcttgaagtaaaaaatttgaaaaagtattatcctgcaggcaataaattacagttgaaagcagttgatgatgtttcgtttgatatatatgagggcgaaactctgggtatcgtgggcgagtcggggtgcggcaaaacaacatgtggaaaaacgtgtttgggtatggtagataaaagcggtggagaagtgttatttcacgggaaagatgtgcattctatgagttcaaaagagcattttgagtttacaaaaaaggtgcagatgatttttcaggatccttattcatctttagatccccaccagaaggtatatgatatcattgctgaaggtatccggatccatagaattgcgaaaaacaaaaatgttgaacagaaaatggtggctgaccttttggagatggtaggactaaatgcggaacatgcttcccggaatgtgcatgaattttccggcggacaaagacaaagaatcggaatagcaagagcattgtcggtaaatccggaatttatcttttgtgacgaaccgatttcggctttggatgtatctattcaggcacagatcgttaatcttctgatgaagttacaacagatgcgaggacttacgatgcttttcatagcacatgatctttctatagtgaaacatatttctgatcggattggtgtaatgtatctgggaaaaatggtagagattaccggatccgataatctatattctaatccgagacatccatatacacaggcgcttttatcagccgttccaatagcggatcctgatgtgtctgctgagagagatagaatcatgttaaccggggatgtgccaagtccggtgaatccaccggaaggttgcaggtttgcaggaagatgtaataaatgtaaagatgtttgtaaaaaagtggagccaaagatgctggaagtagcaccggggagttttgtggcttgtcatttatataattgagaaagaaggaaagtgatatgaaatacgattttacgactattattaatcgacagggaaaggatgcaatggcagtggacgcaccgggtaaatttccgagttttcctcttccggaggacggctttgattttattcctatgtgggtcgcggatatgaacttcgcgacagctcctacagtacagtcttctattgctgaaagactgacacatccactgtatggttattttattacaagagacgagtattaccagtcaatcattaactggcacgaaacaaggcatcaggtgactggacttagaaaggaatgcataggatatgaaaatggcgttctgggcggcctgctctctgctctcaatgcatttgccagtcctggggatagcgttcttgtgcatagcccaacttacatcgggtttacaggaagtattggcggtgccggttataagattgtccacagtgaactgaaaagggatgaagaaggaatctggagaatggattataaagatatggatgaaaaaattaagaagcataagattcatgtagccgtcttctgtaatccgcataacccgactggaagagtctggacgcttgaagaactggaaaaagcgatgaaggtgtatcaggataatgattgtgttgttatatctgatgaaatctggtctgatatcatattgaatggaaatcatcatattccacttcaatctatcagcgaagatgcaaggaaacgaaccattgcgctttatgcacctagcaagacatttaatctggccggtttgattggaagttatcatataattttcgattcgtatctgcgcgatcgtgttagagcctgcagcagtaaatctcattataattctatgaacgtgttgtctatgtatgcgttaatgggagcatacaagccagaaggaatggagtgggttgatgagttgtgtgaagtattatcaaataatgtcaattatgcatataattttattaacacacattttgaagggatatcactttctaagccacaggggacatatatgttattccttgattgtaccgactggtgtgaaagaaccgggaaaacggttgacaagctattgaaggcaggataccgtgtgggtgttggctggcaggatggcagaccgtttcatgggaaaaatgcaattcgaatgaaccttgcacttcctttttcgaaagttcaggaagcgtttgacagattggagcgatacgtttttaatagtgtaattgaatagttattacttttgcgttccttattgaactgattgtaataatttactccaagatccttgaaaactacgtaagcgccaaatatacctgcggattagaaaatccgcaggtatatttggcgcttactttacaatcatgtgtctgaaactttctaattgtctcagtaatacaatactatttatatcttcttggcaaaatattgaatcaattcatcctgtgtcacaatatcttctcgtattccaagctgttttgccaggctgctgatatatggttttttcagcatactttcttccaataagctttcgtcctgaaagatctcttttacctgcccttccttcaaaagatttttatgagccattacaaaaaccttttcaaaattattcacgacaaattccatgtcatgcgtgatcgtaacaatcgtcgctccttttttactcagttcttccagaatctcctccaaacgccggataccatataaatcctgcccggctgtcggttcatccaaaacaagtattttctcgtccatagcgagtacagatgctattgtaacaaactttctgattgacaacggaagattatacggattttcttccatatgctctgacaaaccacaaagtcttgccgcccattctgccttttcctttatcttcaccgcatcaaatcccaagacctctggcccaaactcaatttctgccctcactgtattatggaaaatctgttcatctggattttggaatacatatcctgttatcctggaaagctgcgctgtcgtatattcttttgtatcctttccatctatgatgacagcaccttctgtgggcttcaaaagtccattcatcattttaaccgtcgtcgtctttccggctccattctgtcctacaatcgcaatcctggctcctaaaggaatgtcaaatcctacatgttcaacggcagaaaatccgtttggatattgaaaacttacatttttaaattctatgatccccattgagactctccttttctgcctaattttctaagtcgctctgccatttcatctgcagtaacgatcttttcttttataggaatcccttgcctgcgcatgttttctgctaaaagaaccgtctgcggaagcataatcccgtgcccctgtaattctatctctgataaaatctcgtgtttttctcccgcgcggatcaatcttccatcgcttaatatcaatatttcatcactgtatttggcaaccaattccatcttatgttctaccaatatgatcgtctttcccatttccttcatcttgctgatgatgtcaaaaaccctttctgtttctcttggatccagctgggaagtcggttcatcaatcacaaaaacatccggttccaaaaccagtactgatgccagggcaactctttgctgttgccctccagacagttcgaatggattcttttcctttaaataagtaatattagtcaactccatgacatcatctacacgttgacggatctcggctgccggaaccccgaaattttccagtccataagcaatctctccatagacagtatctcttgcgcctgtaatctggttaaacggattctgaaaaacatatccaattttggaagccaattctcccatttcatattcattcagatttttaccgtcaaaaacaacttctccttccatctctccttggtagaagtttggtataaatcctcttaaaatattgcaaagagtcgtctttccgcttccatttgctccaaggatcgcataaaacttccctttttccaacaccgcgctgatatcctgaacactgggttcttgcgctaaaggataggtgtatgtcacgtttttcagttctatataacccataacatgatcctccctgctatcgccgcgataaataatattgtaataagcacaattgctgttgtatctgccggcgtcttttcaatatcttccaaatgcgtaggcttgattttagaggaaaaccctctggcttccaaggtcagcgcccgttcctctgtccctgctatcgaactcaatactaatggaataatcgtagggatgaacaccttcgcacggacaatgatatttccttctgtttccacacctcttgccttttgagcgttcatgatcgtctgggattttttctttaaaaccggaaccatctgtaaagtcgacagcactacataagatgctttggggctcattccctgcttttctaatgccatcacaaaatctttttcttttgtaactgcgaaaaaccagatcaggctgccgcctacacacatcagtgtaaatccaagttttaaagcgaatagcaatccttcccatttagcatcaaatatccaaaaagagaacattactcttccacttggataaaataatgtctgtatgataagaaggataataaacagcacccctacggaattccgtactcgccgtataaaaaccaaccacacgccgctaactcccgccaagatattgatcagcacaaaacaaatgactttgctgaggattccaggcattgcgacagaaataataaccagaacaaccgacagataaaactttgtcagaggatataaagaaaccattttattcttttgattcatgcgtattctcctcgctattttgctcctgattttttaataaatttctccccgaacctgtattttaccaatgaacgttctggaattgcttttatgataaggtatgccacaaaaacagagattaattttcccacactttctgtaattatgtatacggaaaatacagactgtaaaatctctcttccagtagccatcaagcccgctgccagcatggaagctcctccgccggttgctcctccgaagaaaaatacggttatcggtgttgctgtaattgttccaaccagtgctagtataatgcctgaaatgatcaatttccagatctttgtcatcatgttatatttagagagcagcccggaagcaactccaataaagagtgcacagaacgcatacggaatccaggtcggatcaaatataccattgataaggttcgtcaaaactcctgtcacggctgccggaatcggacctgccaaggctcctactaaaataacgcctatcatgtccagatctaccggcaattttaatatggaagtcatctgaccgccaacaatattaattgcaattgctacaggtatcaataagatcaccattaacgaaaacttttcatttgccttattcatctctttttcctcctcaaatcagcgtatttctgtgatatcttctccaaaaacagttttaaaaaataaacgataaaattcttccacatccacctcataagcatacagagcattgcagtccccattgttccaatgtccgttaatatctacaatcgactgcccttttgcaatcccttttgtcaccacatctatatatgccggtttcagtttcaagatggaaggctctatgaaatatgccactgtcagcacatcatgcatcggagaaactgccttccttcgggatctccagttatcatcaagtccttcttttgtaatgttatatacaaaagtagaaagccgggtatccaatatccgtaaaatttcccgcatattgcaatccattgcaatcttatttgtaacatccagtccgatcataacgacttctttgataccggcctgcaatacttcgtgagccgcctgagaatctgcccaaaaattatattctgccacaggcgacatattacctgtgtatttggaacctcccataataatcaaacgtttcaagttcccggcaaattccttggatcttcgaatcgcttttgctacattcgtacatggtccaattgcaaaaagtgtaatctcccccggatggtcattgacatactctaccagaaaatctaccgcatgcatgcgttcttctattttgtcagaaagaatggtatctgcataaccacccagcccatcatctccaaatgcgctgaccgtgtgcggaatcttttcgtctaacgctgcccctgaaccgcggtataagggaatgtcctttcgtccgcacagcgaaaggatattacacccgttcctggttgttgtatccaatgcaccgtttcctgtcacagagcataccgcctttagatcaattttttccgaatgcagtgctaaaataattgccagcgcatcatcacttcccggatcacaatcaataatgatttgttctttttccatgctctttctctccttccttcttccttttaccctctgtctgcttctgcccttgtcggtatggaagtctgagctccttttcttgtcaccgcgatggcggataccttttgtgcaaactgtattgcttcccggctgttcttcccttcgctcaaagccagcgcaaacgctgccgtaaaactgtctcccgccgccgtagtatccactgccctgaccttctttgccgggaagaattcctctccatcttccgttaccagaaggcatcccttgcttcccagagtgacaattacatttttaacgcccctttcaagcatgtttctggctcccacagtaacctgctcctgggattgtatcttgatgcccgtcagtatctctagttctgtttcattcggtttcatataatccaccccttgaaagaaactgtccggcagatttgatacagcaggcgccggatcaatgatgaccaacttcccaagcttagatgccagatctttgacatattccactgtttccacaggaatctccatctgcatgatgataatgtcgctttccttaagcttttttatatgcttttgtatcatctcctttgtgaccatgccgtttgtccctgcaataatgatgattgcattttctccgttgtcatccacagtgatgaatgcctgtccagacatctcgttttcgagaacttcgatcccagacgtatccacatgcacgcattccaggttctgcttcaaggcccgtccgcaggcatcgtttccaaccgccccgatcataccaacgtttccgcccagttttccggcggcataagcctgattcgcacctttaccgcctagaacattcgtaatgctctttccggtaatcgtctcgcctgctttcggcatatgaggagtttccacaaccaaatccatattcaggcttccgatcacaagaatctttttcttaaattccatttgctccacttccttttcctctttcctaaatgttgtatcccgaatagatctcgtcttcatagatatcgaccgcctttcggtccggaagcgccggctgtactccgtatctggtgaccgtgatgccggatgcatagagcgcaaacccgatcgcctgcatcaggttttttccttcacttagatacactgcaagagcactgataaaggaatctgcaccccccgtcgtatctacaggctcaaaccctgtacctttaaaatattcagatcggtctttgttcgacagataacaaccatttgctcctaatgttacaataatgttgccaatccccttcttttcaagaaccgatgccttttcttccacgctcccctccccgggtaccaaaacattcaattcattttcattcggcaccatataagcaatatctgcaaataaatcttcctttatctttttggatcctgacggctttaaaatgacctccgtgccgttgcacctgcaaatcttgatcgtatattccacaatcttttcaggtatctccgtagagagcagacaatattttgcactctggaacaaatattggcattgattgatctgattcacgcttaaactccgatttgctcccggatatacaacaatagtactctctccattttgatccacattgatatacgcctttccgctgggcagggaggtatcaaagatcacaccatccatatgcacatgattctccatcaggctagtatagagttgtttcccgtccatgtcatttcccagacatccaatcatatagacctgcccccccagttttccggcgcctaccgcctgattcccaccttttcctcccggaaaagcaaataccctcctagcaagctgcgtctctccgttgaccggaatcttggatacttctatggtaatatccatgttcatactccctaccacgacgatcttttctccttgcttttcttggggcggaggcaggatgctattcctctcaatgagagatgggggaaaacgccgcatcaattcaatctgttttttctccctgaccattccaatcaggcactccactgcaacccggctcatatgcgccgccggaagttcgactgctgttataccacagcccaggatctccaggagactgccgtctccaatgacgatcatagacaaggaatccggaattacggctctggttcgctccatgagtttccatacgcagcaggcgatctcctgcgacccgcagattaccgccgtgacgctcccgtccagacactggcggatagcgtatttttcaatctccttcatcgaactgcctcggtaagtccataccggctgtatcagataattctgattctgcattgcctgccgatagccttctaatatagtctcgtcccgctcatcaataatacaagcaatcttctgatgccctgcttccatcagcctttctgtcgccattcttcccgcttccgataaactgtagtaaaaggctgccttttgcttttcatctaactctttcgtctggttcagataaatcgatgtagattctaacctgccgcaggaaacccatcgctttgaatctatcaaaattccggatatctgctttctttctatttcctccacacaggcagggatctcttcttcgttctgcgcataactgactaccaggctgtatccttcttccccagcagccttttctgtacttagcacaatggtctctcgttctctatgatccttttttatcaccagaccgatcagatgattttttagtccttccttctctaggaatttggaatacggcacataatgttcttcttcaataacctgtagtacttttttctttgtcttttcactaatatcatggtctttgccattcattactttggaaaccgttgaagcagatacaccggcaagccttgcaatatctagtatattcatttagcctccctcctgaatatttcatgcacatcttagcattttattaatttgtaatcaatattttaaaattacgaaactattttccgacattttatacagtttataccgtttactaaatatatttcgtatcgtattttctgcaaatttctacaaggattattttaccagaaacagaactctgctgttttttccttcacatagattagtactttcatcagtaagcaaccttttctttctgtgtgccggatctatctctaactcttggaattttattctttttactgtatttataatatggatatacctttttcttatacttatatcgtttaaaaaagaaccaaaccataagcctgggtctactgcataacaaaacgcatcagacttagttgtataccatggtttcaatcattgatgagatttatattgaagatttttgaaatcaaatagagatgacaaaaacatattaatttaaagatatgctttggctgtcagctggagaagtatgaaaaaagaatattttaagacgtagcaaaactgacgtaagttcaaacttacgcaaattagacaagatgaagttcctgtaactcatgcaatttgcttcaatgttttcagtttgcggtaggactgaccggaacgggtagcgattactgcgaccgcaactgccagcaggctgatgtgagcaagggtatttaagttcgtgacagagcctttgttgcttacccacattcgtttctgtctggtatttttgaaccggaagctataacgctcacattccgttcgaagtgaataattgtttttaaagtatccagcctgctaaaaaaagtgcgcacgatgccttgacgggcaagaaccagtacttgaaatttcatgatatcggaaagcaacccttttttccataataatttcccactaacgtagtcacggttgacagagcaccccgttctactcgcagtgatgtccgcatttgccatgtccatgtccgccgcagtctccatggctgtggtcatgatgcgtgcacatcgtgtccggatcatagtttaaggttccggccagataagactctacctgcgcgtctgcgtctccctgcgcgccggggaatagtttgatgcctgcctctgccagcgcattccttgcgccgccgccgataccgccgcagatcagcacgtcaatatcgccatttgccaggaatccggctaatgcgccatggccctgcccattggtatctacaacttggcttcccgtaatctttcccgcctcgacatcatataccttaaactgttccgtatgtccgaaatgctgaaatacctgcccattttcataagttactgctatcttcatatgtcttctctcctttcccatacctggggtttctgaatgacatgctgccaatccgtttaaagaacagtcagaagtcttttctttcactgctgccctatgacttaattcatagtctccgccctcgatctgaagactgattccttccacaaggaatcttgccagtttcttacgtgcttctgcatacagcatctgcaccgtcgctctgcttacttccatctgccttgcgcactcttcctgagtataggccatatagtcaatcaggcggatgcattcgtactcttccaccttcatattgattccatattctgtctcagtccctctggaaataaaatggctgttctgcggcatctttaagactcgcttttttttccctgttcttggcattcgccctctcctttattagcatatgtcaatataatcattatatgcatataattggcatatgtcaataataaatgtaatgagagcaggaattagcgcttcttgctttcaaaatatataaacctctcgatggagtccagtatatccttgaaatcttctcttggcgccagatcaatataccttttcaggatctcttcttcatttcctttatattttccatagaaaatatcatagaggttatgcccgcgcatatagatcttgatttcttccatgtggcttttaatatcctgtatcgtcaacagatcctttccaagaatctccaaaagttttttcccgcttttcattctatgcagatattccttccatttttcaaagagagtctcataaaaggcttcttcagactttatgatcccaagtttttccatcaccagcgggttcaggaaataattttcaaaggaataatatttcagcaccagcacgtttctcctcgttacccggggcagccggtcgatatcttccgcattcctctcttcataatatctgcacagctgattcttcagcatatcgctgtccttgccatccccatcccgtatcatcagaaaattatccttcagatagatctggttcatatactttaagttggcatacgtcttaatattcgtgcagctgttggtggtaatgatggcaatccttgacaggttcccctcttcatcatacgtctccgagtaatatttcttgatcagcagcggaaggcggctcttatcctgctttccctccacgataaacacaaagtttacattcatcaggtcgttggccgaatatcccagatcatccagaaccgcgctgatatccgtcttctcacagacctgggaatatccatcctcgccaagtacgacctgccggatctggcggttattaaaattagccaggagattgggggaatgtgtggaaaatattacctggctcctcctggagagacgatatagtatctcgcctgagactttctgaagcttgggatgcaggaatatctccggatcttccgccatgatcacatcccctgcctgccctttttgatcctcgtaggtctccagaagagacagcatatagatgcttcgcattcccttgcccatacagtttaccggcctacgcctgttctgcttctcattgtacatttccgccgtaacggaaagcatcttctctatatcccggttcatagaatatagtatcctgtctctgcccccgtttttgcggaaattctcattgacactctgggaaaatgcatccaggtttaactgatacagtttataatccagcagcttggcggcttcaaatgcattcagttcctctgtcgtcttctgatgaatcagtccaatgcaagaaaagcaatggttgcatgctttggcctcccattccagactatttgtaggaaaccactggattcccatatcttgcgccatttaattcctgccttataaactttaaagtttccagaatgttcttatcgtccgtgtttactccatggatagcaggaattttaattaccattggtatatgaagccccgccacactggatgcaatggatatcttccacttcttcataatcgaaatagccgcaggtctccagcgcgactgatattcccatgtcataaaaggtcccttccagttctcttaggaattccgtctgtgcggcggcctccccgccagagaatataacgcctcctccttcccaagttctatgatcctctggtttcggcttccccggaagaccagcgtcacatctttctcctcttcgataaattctccgtccaccagcacatcgatataagaaagcatctcctccgtcacttccgtgtacaccttgccccctttggacaggtccacgtcatacagatagcctgtgtagcaccatatatccttgtcagggtaggtttcccgcactcttttaagcagccctgccagttcctcctggttctccggctcaaatggctccccgccaagaagcgtaagcccctgaatataagaaggcgcaagaagacggatgatctcatcttccgtctccttcgtataaggcttcccataaccaaagtcccatgtctctttattaaagcatcccttgcaatggtgccggcatcccgacacgaacaggctgacccggacccccgggccgtctgcgatatcgcattcttttatatttccataattcatattgacacacctattcccacataatgattgcagcctgtatctttatgcctatactttttaggcttcttcctacagatggagcactctgtctttaatctcctgggtgcgtccctgattccagaactgggttccgatatagccgcaggtcctgcgggctacgaacatcttattctgatcgcggttcccgcagttcgggcactcccatacgagtttcccggactcttcctccgtaatcttgatctctccgtcatagccgcagcattcgcagtaatcactcttcgtatttaattcggcatacataatattattataaatgaactgcatcaccgacagcacggcaggaatattattctgcatgtttggcacttcgatataactgatagcgcctcctggagacagtttctggaagtccgcctcgaatttcagtttcttgaacgcgtcaatctcttccgatacatgtacatgataactgtttgtaatataatttttatcggtgactccctctatcatcccgaatctcttctgcaggcacttggagaacttgtaggtggtagactccatcggcgttccatatacggagtagctgatattctccgcttccttccactccttgcatttatcgttcagcctctgcataaccttcaaggcaaatggcctggcctgcggatctgtatgagacttgcccaccatgcgcatgcacatctcatatagcccggcatagcccagggaaatcgtagagtatccgttaaacagcagccggtcgatcttctcgcccttcttaagccgtgccagcgcgccattctgccacaggataggcgcaacgtccgatatcgttccaagaagacgttcatgcctgcaccgtaacgcgcggtggcaaagttccagacgctcgtccagaatctcccagaacttgtccatatctccctcggcagagcatgccacatccaccagattgatagttaccacgccctgattgaaacggccgtagaacttatggcttccatcctcatttcgctgggaatcctccaccgtcaggaaggatcggcatcccatacatggatatacatctccctgcttcagttctttcatgatttttgcggaaatataatccggaaccattcgttttgctgtacattttgcggcaagctccgtcagataccaatatttggaatcttctgtaatattatcttcatccaatacatagatcagtttcgggaatgccggggtaatccacacgcccttttcgttcttcacgccctgcattctctgaaccatgacttcttctataatcatagccaggtcttcccggatctggccatcctctacctcatccagatacatgaatacagtcacaaatggagcctgtccgttacaggtcatcaaggtaatcaattgatactggatggtctggattccgcttcttacttcatcccgaagccttcgctccgtcacctttgcaatgatctccgcatccagcgcctcgccgcattctttgcgctcctcgattacattattgcggatcttctgacggctgatgtctacaaagggcgccagatgcgccaaagtaaatgactggccgccgtactggttgctggcaacctgtgccacgatctgcgtcgtaacgttgcacgccgtaaagaagctgtggggcttctcaatcagcgtctcgctgatgaccgttccgttctgcagcatatcctccaagttgatcaggtcgcagttatgttccttctgtgcaaaataatcggagtcgtgaaaatgaatgatcccctcttcatgagcacggacgatttcttccggaagcagcacgcgtttggacaagtccttgcttacctcgccggccatatagtcacgctgggttgaattaataaccggattcttattggagttttcctggttcacttcttcgttaatatgctcaaggagagataatattccattatccgtggtattggactttctggtcaattcccttttataacggtagcgcacgtatttttgcgcaacctcatatccccgcatctccatgatgccggtctccaccatatcctggatatcctccacattcaccgcatggggaatctcttctacccggtgtgcaatattgtctgcaatcgcgtttatctggtattcattcatctggtggaggcggtctacctctttgttcgccttgcggatagcgttaataattttttcaagatcaaaggaaacttcctctccgcttctcttgattacgttagtctttacttcaatactcatgatgattcctctcctatatccactaaatgttggttcgctctaactattctcatacaatatctagcgccatataatataatactgcaaaatcaacataaaagaaagaggaaatttttaatatacaatatttactttatctttaccgttttgtgcactatttcttttcatctatcaggcccaggtggacaaaggctttccaaaggccatcctcatctatggaatctgcgatataatctgcagcctctctggcttttgcagtaccatttcccatcgccaccccgatgcctgcataccggatcatctccaggtcattgtcattgtcgcctatggcaatagaatcttctcttgtatagtccccggccagaagaatctgccggatgccctccgacttattaatataatccggcgtaatctcgccggcccacttttcttcatatggcacgcttaggtttacgatatggaaagaatacccccatttagcaagaatatcctctccggacatccgattgctgaataccaccattttctccacctcaggaacatccagcacggagtctatcggcaccggcggctttacgccttttttcgccacctccgggttctcatacatcctctccctgattgccagatatgcttccatgtcctggcttagaacataactttctcttcccgtttcaatctcaaccacgcactggtgcagcagcaagtcattcatcagttcgatataggctagctgggtaaagtatctgtggctgatgcattccccttcatactccacatatccccctgaacttgatataatcccgtcaaatccaatatccaggatctctttgtctatacgcgtatatgtgcgtcctgtactaatgcataccttgtgtccattttctcgggccatatgaatcgcttttattgcggaatcgggaattatgccgtcaaagtccctgatcgtcccgtcaatattcagaaatactattttccccataaatactttcctttctcagtttggcaacgattcttcctagttttatgctatttctatgttaccacatattttgattctgcaataccagtaagtgagtttttacccaaactatttttaaataagtataatgggagacggcagatcacggacgttggctgaattttctgttatatctccattacttcttttaatcgtttcaaatctttgtccaaatgctggtacatgtccacatagaatggatacagtctatcgtacgcttccacccattcatccacaggctggatgatctcattcacctttacaatctgctctactgccttggtcagatccgggaacactccaactttatggcctacgatcaaagcatctccaaccggaacatcgccggatttttcatccaggagatataccggcatatgaagcatggaggcttttatctgggaccaggtacggcttttggcaccgccgccgcagatcctaagaacctttgctttcgcgccggaggcctttaccgtttccatcacatgccgcagagcatacgccgtgccctcgaacacagagcggattagatcgctccgcttcatatccatgtccatgccgataaacattccccgggcatattcattccacagaggcgccctctctcctaataaatacgggaaaaagaagaggccattggagcctggggcggattcaagcgccagttcattcaagtaagtgtaaatattcttctcatgggcagccgcatactcccgctcctctgctcccagcgtctctataaaccatttaagcgctgctccgctggtctggatcggcgcgtcaaagacccagggcatgccttttatcgcacaaggcttcgtcacaaccggaatgtccggcgcgctctttatatcgctgcctacgaataccagagaagtcgttccggaggactcccctgcctctcccagacggctgaggcctgtggcgtacatggatgccatcgcatcgctgcatccggcaactaccggaattccggcagcaaggcctgtagcattggccgcctcttcggttacaaatccaatgatctcatccaccagctgtggctttggaagcacatcattcaagttcacgccgatcacgtcgccgatctcatcggaccaatccatggcattgatatccagacactgtgtccgtgatgcctggtcgatatccatcgtcatctttccggtcaatttgtaattgataaaggaacttgcctgcaggaagcatgcggttttggcaaatagttccggctcatttttcttaaaccacagaatcttatttggaaggaacgcaaccgccggctgtcctcccacgattgacacaaagcggttgaatcccacttgatccacaatgtaatgcagttcggcagccgatcggttatcctgatacgtcagggcattgcgaagcggattgccgttcgcatccaccggaagcatggttacggtatgggagctgacggagattccccgtattcgcttgaccacttccttgccggccttctctgtaagcgtccggaagatgtccacggtgttgtcccaccactgcgtcgcgtcctgttcctgcatattcgggcctggcaccagaaaccggctgggcttgctggcctcagccaccacggttccatcctcgctgagtataattgccttgatattcgttgttccgcaatccattcctaataaataattctctactcttcccatctttatttcctccatattatcaaaatgtacctagctgaacgttcataatctttatactaaagatagcaaaatagcgtacaatgcacaaaatcatattttcctttttattcaggaaatttctaacttcttattcagatattattgccgttataatacggcaatatcgtgtttgaaagcatttggcccgctctctatacttaaagtgaaataaatagaaaggagctgttcttaattatgaaaatgaaagcagcattaatgtacgggccaaacgacatccgtatcgaagaaaccgaaaaaccaaagtgcccacaagatggccttattattaagattatgtccgtgggcctgtgcggctctgacatccgcaatctgacaaccgattccagaaaagggaattatccgtttatctacggtcacgagattgtcggatatgtagacgaaatcggcccggaccagacgaaatacaaagtcggcgacaggcttttcctgttcccgggaacctattgcatggagtgcgacgaatgcatcagcggccacagcgagaactgctccaataaagaagtaagttctcttgcaggaaccggcggttttgcccagtatgtagcagtaaagggagaaaaaatccgccggggaggcatctatgagattcctgaagacgtctcctttgacgctgccagcctgggcgagccccttaccagcgtattcgcctgtctggaaaatgtaaaagtcggctaccctgacacgcttgttatcattggagccggccctatcggatgctttatggcgcagcttgccaaattccgcggagcacagaaggtgatcatgcttgacttgaatgacagccgactggaaatggccaaaaaattcggcgtggacattaccgtcaacagttccaaaaaagatcctatcgaagcggtcaaaaaactgacagacggaaaaggcgcggacaaagtaatctccgcgactccggtcaatgccacccagacgcagagtattcatatggtaaaaaagggaggtctggtcgtattctttggaggcgttcccaagggctctatgaccgaactggattgtaacctgatccattataacaacatttggatcaaaggccacttcggcgcgtcctacagccagtctaagagggcattccaactggccatatcccctacattccctacggagaagttcattacccatattcttcctctggataagatcaacgaaggcatcacgcttacgcggaccggagaggctatcaaggtcgtgctccatccgtgggatgaataaaaatcatagttccctcaaaaaaggaagatggcgatctgccatcttccttttctatgtctatttctattattcttgtgaatccagcgcctgagcatccgtcgtcggtgccttgatgcatgccacaagcccgatgatcaccaatgctgccgcagatacgataaatcgcttggaaatgtctccgccagccatatttgccagagggtttaccacataggctgagataaagttgcctacattataggtcgcggaaacgatcgcgattgcaagggaagcctgcgccgcaggaaccatattcgctgcaaaagtgactgctcccggattgcggatggcaaatccgaatcccactaccgccgctcctatacagataaccggaaggcttgtggaaaagcctaccatggctgttcccgctgccatcatgaggattgccgctccgatggtaaatcgcttgaatatcttaaccgtattgcccagtaccagtcctcccaggatgccgatgacctgcatgatagacgctaccgttccggcagtgctcgcatcgccgattcctttccggtcaatatacatagcaatgttggtattgaaagttgcaacaaaaataccggtaatcaggcatagcgctccaaagtataccatgctccctgagatgccggatttggccttctctgtcttgggaagcacttctccttttggtaccgtcagcatgacgatcagcgtaatcggaacgcagatcaggaatacgagatatccccgcttccatcctgccatagcggtaaacaatccggaaccttttgcgatcagagtgccgccaatacttacgaaaatagactggaagcccataacccttgatttttcaattcctgtaaaataatcggatatcaacgatgaacttacaaccaccaccagggaaagacctgcgccgatcacgatgcttgccgcatacagcatccacagctgggtgttcaatacctgcggcatcaatcctccgatcagcatcagcactgtaccgatgaccgctatatcacgcttggtaatcctggactccataaatggctccagaaacatcataggcagcgtggtcagattgatcaatgtaagtacgatctggattgccgaatcacttgcatccgggaagaactttcctacttccgcgagaatcggggccagggcgctgttgcacgccatcgtaagcgacattaccagcaggcccgctgctatcacttttttgttttttcctttttccattttctcttcttctcctttagatttttatctcttccatatatactttctttcttctcccttgagatatgccaggacctcctgggccatcatctctcctgaccagttgtctacgtctgtcgtaagtccggccatatggggagtgcatactacatttcgcatagatagcagtggatgattggccggcaccggctccttccaatacacgtctatcgccgcgccggcaatctctccattttgcagcgcctcaacaaagtctttctggtcaatgactgctgccctagccgtattaatcaggatggcagtaggcttcatctttgaaaaccagtctttatttaccatccctttggtagcgtccataaccggaagatggatgctgaccatatcgcttttagcgagcatcgtattaagatccactgctttcgcgccgtccgcctcgattctttctgccggcatataaggatcgtacgcgagaatctccattccaaaggcttttgcacgcacggccacttcccgtccgatggcgccgtaccctgcaattccaagtttctttccatacagttcaaagccgatgccgtagtcggtaaaaggatgatgctcatccagcggcccccagattacattctttacgtctggcacgtcataaatattttccatagactcgcccaaatgctcgcctttttgcagcccggtcgcgctaagcgtaagttttctggccacagccagcatcagtccgatgttaaactcggccacagcgacacggttccttcccggcgtataggacaatggaattcctgccgcctttaacgcctcattgtctaccgtaaccggcgttccttttgccacgccgataaatttcattccggatcctatccactcactaagcgtgtcagcaccggcattctcatctcccagcaccacaatctcataccctttgcactcctcgcggatggattcttctgttacatttcctttgccgtgcttcaattcgccggcaacggtaatatcgcagaattcttcaatctcctgccttctcttctccggcaattgggtgcacaataccaattttttcttcatgtcgtcctccttctatcctcatttctatactagcagcgcgctgtaatacgctgtatttatcgcatcgtagatttttcctatcttcttgcagtctccgataatatagtactcatccaccagatctgccaattcatccactttgtcatacggggaggtaaagccaagggcgcacaccaccgtatccgcctccaccagcatctcttctccatttcgctcgcagagaacgcctgatggaaccacttcttttaccttcgtatctacgtagcatgtggcagccttttctacttccggcatcagccctccccggtagaaggaattgacttcttccgcgatggcgggcttcatctcgatgatcgtgcattcctttccttcgtggtggaatccgattgccgcctctgctcctaccaggccgcctcccatgatggctacctttttgcccagtttctccgggtatagttctgcctcaatggccataaccaccttgtcagaatccaggcccttgattggcgggcgcatttcattggacccgattgctacaaaaagcacatccggctccgtctcttttacgtaagcgggcgtaacatccgtattaagcctgacatcaacgcctgcccggctgactctcttttccatcacttcaatcagcttacggatgtcttctttaaaatatgccgctcccgcgggatgaaggtttccgcccagcttgtcagacttctctgcaagaatgacctcatggcctctattggctgcagtgattgctgcctgcattcccgcagggcctccccctgcgaccaggactttcttcttctgcccaggcgtcttctttggcagttttgctgccagctgctctcccatggtagggtttacagcgcacttaaccatctccagctggcccgtagcgccaaagcactcgtaacatctcaggcacggggtaatatcatccgcgcagccatcgtatgccttcttcggcagatatggatctgcaaggcttgcccgccccagttccactacatccgcctgtccggacttaatgatctcttccatctgggccggatcattcaaagagcctacgcaggccacgggcgtcttcacatgcttcttaatctctgcggccagatacacatttacccctcttttatagaaggcggatggatgagtgcggcagaacatatccggatcttcgtggtttccacaggatacattaatcagatccactttgtcgtcgatcatcctggctacttcgatgcactcctcaagcccgagccctttatcggtcatgtcatcaccggatatcctggcttcgatcgggaatccagggcctactgcatcccttacagcgtccagggccagcaggaagaatcttgcccggttttcaagagatccgccgaactcatctgtgcgtcggttccacaccggagacaggaactgtgaaaacagccatccatgcgcagcatgaacctgtaccatatcgaatccggtctccttgcacagccttgcggcctttccataggattcgataatctcatagatcaattctctcggcatctcctttacctcgcctgccggcatggacatctcgcttggtccataggcaacgctgcaggtatctacgtcccctcctacgctggagagtcctccgtacatgccgccatgggagagctgtatattagcaaaagccccggcattatggatcgccctcgctgcttccgtcattccctggcgtacgccgaatgcatccagctgaagctgcttattatgggactttcccgtagcagagtgcacaatcgcttctccatatgtaacgactcccgcgccgcccatcgccttctcttccaagtatgcgatcatctccggcgtaaagtgcccattcagatcaatcatgctgggactggtaggcgcgcagataattctgttcttcattctgatattccccacccttaatggagcaaacagatgaggatactgctttccctttccacacatgcattttgtttccatctcttatctccttccctgtaatcccggcgcctctataatgccttgcgaaggattgcaagaacatcttccttggttacattctgtctggggttgaatcccagcactggttctttcagtacgtcgttcgcaagcatatccaggtctttttcctcaattccctgctgggacaaggtcttgatgcccaattccttggtcagtttcagcagttctgcggacatcagatacttatcctcttctacatttcctgtcaccggcagatgaattgcctgggcaagttccgccatcttctccgggcagctgtctgcattgtactccataacgtatggaagcaccgtggcattcgccatgccatgagcaagatggaaatgcgcgctcagcgtatgcgcaatgccgtgtaccagtcccagattggcattagagaacccgaatccggcaatgatgcatcccagcatcatctgctctcttgcttccatatccgcgccgttctttactgcccgcggcaaatatttatagaaaatctgcagcccttttagagaatggtactctgtcaaaggcgttgccatattggaaatataactttctaccgcatgggtaatggcatccattccggtggccgccgtcacagaaggaggcatggtcttggtaaattccggatcagcgattaccttgtcggccacgatcttattgtctatgatcacgtatttgcagactgccttggtatctgtaagcgctactacattcgtaatctcgctggaggttcctgccgttgtcggtatcgcgatcagaggcagcaccggattttttaccagtccgattccgccatactgtccgatcggcccagggttggtcatcaatatatttaccgcctttgtcaggtcaatgctgcttcctccgcccactgccacaaagacgtcgatctcttctttctgcgccagcagcgctgcctcttccacgacttcattggtgggattggggattacgccgtcaaacacggtgacttttgcgtcggctttttctacctccgcaagtactttttctgcaatgcctgccatcttaacgcctgcatcgtagaccaccatcacgctcttagcctcatattcctttaacatatccggtaatttcttaacggcatttttgccaaacactacattactgcttacaaaaaattctctggccatcttctcgaattcctcctatttagactgcctggtcggcagcaatcaattccttcatcttctttacccctgcttccggcattggctcaaaactgccaagcaccttcgcgtagtaagccgttgtcgccatctcttcggtataaacagtggctgccattgccgccttcatgtccttgccgcagcagaacatgccatggttcttgatcaatacggatcttccagcgcttcccagcgcctccactaccttgtctgctacttcatcgcttcctggcatggtgaatggcacgattcccaccggtacaaattcgcactggggaggagtgaccggtacaagctgcgcgtcatcgcccattgccataatggttgcaaacattccatgggtatgtaccgttgccttgacatccggcctcgctctcataaccgccgtatgcatcggcacttctgaggatggcttgtatggcccgtccagccatttcccattcaggtctacgattgcgatatcctctgccgtcattcctgtatatgatattccgcttggcgtgatcgccaccacatcatcctcatcgtctctcatagcaatgtttcctgatgtcccatggatcaacccctgatctaccgcgtctaatatagcatccaatacctgttttctgattttttcatatttcatagtgatacctccttcaatttctaatgcaattttaatatagtcatcttttcatatcaaacagcatttttccgtttcaaagcggaaataatcatcagaaatattcctcttttttcttgacttttctggatctgctctctattattgaaaataattcatatatcatttcctaaataaggaggaaaaatatgacacctcttacattatcgcttcggcagaggaagttggttcattatctccagcttcagagcgcctatactaccggccaggaacttgccagccagcttcaggtatctgcccggaccatccgcaatgacattgcagaaatcaaccagatccttaatggcaccggaatccgtatcgcttccaagcgaagcgaaggttaccttcttgtgtccagcaaccaggaccagttaaaagaattaagccggaccagcagttcttttctgtcaagagatgagcgtgtaaggcatattgccttccggctatgcctttccgatgagccggtgaatctttacgatctggaggatgagatgtttatcagccgaacaacgctggagcatgaccttcatgcgctccgtgccgactatatccttccggcgccacacgttaagttccaccgccacaagaacaccgtctctttcgagccggacgagcggaagcgaagggcgattctgaaccgactttttaccgagaactggaattataacgccaaaggcaatgcctattatcagtaccagtatttggatgagcgggtggtcaaccttattatgcaggaggtcaattactatatgacccggtacaatatcatgatggaagacatcaacatggtcattctggatcttgcaatcgccatcatgtattaccgcgtaaccagcgggcacgagctgacagagccgctagaggtacaataccaggattctaccgccgtccacgctgtagaagatctcctggattctctggaagataagctgtcctgccattttccttccattgagcgcgaggatatctatctgcatgtatcctgcagccggatgctggatgcaggtaaattgaatttcgccacggttgaggcctttttcgaaaaggatattattgacctggcagatacttatatccgaaggattgcggacacttaccgcctggacttttcagacaacgaagacttctatataaccttgctgcagtacctgcgttatctgtccctgccggtccattatttcaatttggtacagacgcagtcagatatcgcgcgttcccgtctgctgattgaattcgagatagcattttccatccagtctcttgccttggatttttatggcaattatctggatgatacggaactgctctatcttgccttctgcatctccggcgcgctggcttataaaaaccggacgtctcccaggcttaagaccgtcatcatgtgccaattgaatctgtcctcctcctgggatttaaaacataggattctgagcaagttcaaggattacattgatctgagcgcccttctgcctgtatatgtaaaagataactatgacttcacaaaggtcgatcttatcattaccacggccaacaaggagatcacccgcgagcccaactgcaagaccctgctgattacgcctttcctgactcaggcagatcaggaaaaactggaaaaccacattgtaaagacacagatcaaccgtctctacaatacctctctgccttctatccaggagttgtttcaagaggctttctggcatgaaaaggtggtcgctgatgatcgtttctccgtgatagaaatgctggcgaaggacttcatcagccggggctatgtttccggaaactatctggccgacatcctccggcgggaatccatcctgacttttgccttccagcccagcatcgtgctgatgtattcgctagagccaagtacaaagacttgcctgtccatcgctacgcttgatcatcgtatcaaatggaattcctacaagattcgtaccgtgatcatggccgctatccgtccggaagacatcaccatagtctttcggctgatcaatgaactgtactacgaaggtttcagcccggatgagacgcggttcttaaaaaccagggaagaacttatcgatttcttccagagattcgcataaaaaaacagagcatggccagatcgctcatgctcttattcatacagattattttgccattaattccggatgcttcagtttatcccacttgccttcttccgtctttgcgacgatcaggatattgatcaggaagaggcagagatatacgatataagcgcccgtaaggcttcccgtcaccttcatcactaccgcgtttacgacgaaattcaggcatccgatacagtaattgatgggaaagatgactccatttacctttggataatccagtactccaaagatcgatgccgggaaggacagagacatattcgtacttcctcccagggaaaatcccacgataaatatggagatgtatacaaaaggcagccagtaagatgccaggagattaaagagtatccccagcgcgaagatgccgcagtatatcatgcaggctttctttgtcccaagcttcgtgtcaatgtagccgatcgcgtagcttcctacgattcctaccagtcctgccaccgtcatcgcagatatggccaccccgttggatagtccaagcgcggtatttcgaggcacgaattgggtaatgatccccagaaggcccagggtaatgaatcccggaactactgccgccagccatacttccttgcatctgagcatcatcggtatcgtccagtcgctgacataatcctcatgatccgtcagattcttatattccgcttcgtagacttctttggtcacgttatccggatacatgcctgcttcaatcggatcatctcttagcgtcgcataggcaaatattcccagtgcgatggccgctacggcaaacacggaaaggcttgtcttatattctgccatcgtcagcaatactgtcatgatcggcgccagcaccgctgtgccgatattcgcgcctatggtactgattccattgacgactccccgtttcttggggaaccagtcggactgcatcggtccggtgcaaagataaaagcacccctgtccgcagcttaccatgatgcattgtgataacccatacattacaatattcgttgccctcaaaaacaggaagtaaaatgtgagcccaaatataatgaacaatgcggcgcttacctttctgccgccaaaacggtctcggaatttggcaattacgagcatcatcgcaacgcctacgaagcccgctacggttcccatgctcaggcatagttcataatcaagccccgccccttcggcaatggccggcaatgcaatgttcagtccatcgttgactcccgcgttggttaccagcatcgcgagaattgcaaaaaacatcagattccaacctttgcccaggtggaagctttctctaatcgttaacttcttatccatacttcttttctcccaacttctacttattattaagcataatcaaattgttggttataatgatgcaccatttttaaactgccaacttttataataataatgtacaactgagacgtattttccttcaactatactttttccgtttcgttcaggaaaaaagaagttaactctctttgccttcctatatctcccgggtatatttccccagccactccttatccttgctgttcaggtaaggagatacctttttatatactgccttatgatacttgttcagcatctttctctcttctctggacatcaggtccgggttgatcgcgtccagatctatcggtacataggtaagcggttcaaaatacatgaactgtccatatttattctcctccccctcgcgtaccagaagttcattttcaagccggataccatgcgacccttcaatatagatgcccggctcatccgttatgatcatgccttcctcaaagggctgcgtctcgccggcccgatactgccagcgaaagcctgccggtccttcatgaatattcagaagatatccaacgccatgtccggttccgtgattgtaatcaagccccctgtcccagaatggcttgcgtgcgatcacgtctaagttcatgccgctgcatcccttccggaatcttacatttgccagctgtagattgctgatcgcgactatggtaaaatgatccttcataatctgcgggatcttgccaagggcatacgtcctggtaatgtccgtagagccttcatagaatcctgctcccgtatccgtcaggaacaaatagcctttcttaagttctacatccgtatccggcgatgatgaataatgtacgattgccgcatgctctccaaaggaacagatgggctcgaaacttggctggataaaattccccatctctttgcggaactcatccaatttttccgaggcgctcatttcggtaatcctgctcttacccacattctctttcagccatttcatgaaccggacatgagccacactgtccttgatctgtgcatggcgaatattttcgatctccaccggattcttgaccgccttgaacaagatctccggattcctttcctcaatcctcaccacatccttagggatgctccgatacagcgcatagtttagcctgtccggatcaatcatcagccggtcttccgatgacaggccgcagacgtccatgtatatggcattgtaggaatgcaggacgacaccatccttagccagccggtccttaatttcctcatctattttcttctcatcaatatacagatacatataatccatgctgataatggcataggacagagccaggggaaagaattcgatatcattcccccttatattaagcgtccagcagatatcgtccagggttgtcagcagatgcatcgtggctccttgctcctccatcaccgatcggatgcgcttaagtttgctggccgtagattcccccgcatatttttcctccagtatgaataccggctcttctgaaatccccggcctgtccttccatatcttgtcaatcaaatcatatcggaagaccactctgcccttctttcttctagcgattgcttcatattggcatccttcccccatcgataccgtccgcccgtcaaatccaatcgctcctccctccggaagcgcttcctccaggtattcttctatcgtcggcgtatccggatgtcccatcttcatcagttccacatggctgtctgcaagttccccggctgcctggataaagtaccgcccatccgtccaaagcctcgcctcacgcctggtgataaccgcagtaccggcagaacccgtaaagcccgtaataaactttctcgctttaaagtattctcctacatactcgctttgatggaagtcagaagtcggaactacatatatgtcaatatctttttcttccatgtggcgccgcaattccaaaattctctcatctacattcatattcgtccatcccttgtttaataagtcactgctattatacggtatctagtataaactttcaactatcttattatactgttgcgcttatttctcttcatcacgactctgtattctatataagtcagtagaaatgacgctgcagttgatcggagacaaatggaaggtcctgatcatccaggacctgatgtccggaacctagagattcaatgagttaatgcgctccgtatgctgcatcacgcagaaagtgctgaccagccacttaagagccatggagcgggatggactggttactggattccatgtgtgcctggggaacagattataagaatacgctggaataaaatagtttcaaaacatgtagctagcacaaaaaaaccgccgtccccggagtactaaaatgctccaaaaacagcgattttcaaatgcgcgatcaggggctcgaaccctggacaccctgattaagagtcaggtgctctgccaactgagctaatcgcgctggcttgttttgcgttgttactttttctgtaacgcaagatgtattatataatatacttttctaaaatgcaagtgtttttttatatttttttcatattttctttacttccttcatatattagtgggggaggtatttatatgaatcacttgtggaagtatattgaaaagaaagacatgccttatatcattgcggtagccgttctgggcgcgctgaatcatttcctatatgagttgtccggcggcgcggctatctttgccttgttctgcccagttaacgaatccacttgggagcacctgaaactacttttctttccctttctctttgcgagcatctggcaatatataaattccagccccagatctgggattatcagcttcttttatcacaggctccttgccgtattgtgcggcatggcttctgttattacgcttttctatacttataccggagtagttgggcgccattttctgattatggatatcctgatcttcttatttggcatactgttctccttttatgtggcatctacatgttccaagaaaagacctcgcaggccctcccagactatcgtattctcatcttggatcatcctttccctttgctttttcgcctttacctgctttccaccgaacattcctcttttctttcccccgcaataaaataatggatctatgtcaaaaggctgtcatacatcttaatgcattttccctttaattatagtataatcatcttatcacattacaggaaaggagcttcaaaattatggcaaatgaacccattaactgcaagattgaacatcatgccattctatttgcatatctggccaagcgcgccatagaaatctgtggagaagaaggaaaagaagccatacttgccggcatgactacatatggaaatgaaagaggccagcgaatggcagccaatgcgctggcccatggcgacgaacttagcacgatgacaaaccaggcatatggggaatggaagccggattacgatggacagatggaattcggccagttgcgtacagaacctaccttgcagacctacatttccaaatgcgcctggtgcgacgcatggaaaaaacacggtctaacagaatttggtaaattatattgtgtcaatgttgacaatgcagtttaccaagggtttcgttcagactttgtatgcactccaaccaccactgccatgagctggggcggggaacgctgcgaattcgactggggccatccgctttctcccggggaagtatctgccctggcggaaaagaaaaaagaactgggaacttcctgtatgaaagatttcaacttccatacagcacatcttaaatccaccatctgccaggttttggttcagaggttgggcgaagatggagaaaaagcgggggaacttgctctaaaagactatacagatacattcggccaggaatatctggatgttctggaaggcatcttcccggaaaccgaatgatcaaccaaggaggcataccatgaacaccttagagaataagggaaatataattgcagcctggctaaagtcccacgaggcggaacttatccagactgccgattatatcttccgccacccggagctggcttaccaggagacgctgtcttccaaatgcctcgctaatctgttagaaaagaacggatttaggatttcctgcaaaacagccggaatcaacacagcctttaccgcagaatggggaagcggaaagcccgtcatcggcttcctggcggaatatgacgctctggcagaattaggccatgcctgcgggcataatcttcttggaaccggagccgccgcggctgcatgcgcattaaaggcagatatgcaggccagccatacagccgggactatccgcgtatatggatgtcctgcggaagagattatgtccggaaagattatcatgaacagccagggcacattcgatgacctggacgttgctgtcacctggcatccttttgacagcaaccgggttagtaacgacatctggcagtcccaggacatcaagaactatatcttccatggagtcagcgctcacgcttccaaatcccctgaaaatggcagaagcgccttggatgcggctgaacttatgaatattggcgtcaactatctgcgggaacacgttgcagatgatgttcgcatgcactatgcctatatcgataacggcctgcccgccaacgtggtgccggattttgcaaagaccaactactttatccgctccagcaagcgggcacgcacggaagatgccagcagacgcgtggatgactgtgctcggggcgccgctatgatgaccggcaccagtgtggagatcgagctggttggcagctgtaaggaaatgaaagtaaaccgggttcttgctgaactttactatgatgccatgacgagaatccccactccgaagtatacgcaggaagaactggattttgcggcagacattacccgggaagccggtctcaccagccacggcttctacttcgcagggctagagccattagaagacaagccagtaccaatctctattggaaccgatgcttccgaagtcagccacacggtaccgctgatcaccatcagcgccgccaccatgtgcaaaggcacgccccttcaccactgggctgccgccaaacaggccggcatgagcatcggccaaaaaggaatgatttatgctgccagatgcatggcagaaggcacaaaattattgcttgagaaaccagaatacttacacaaggtgtgggaatgtcataaaattgacacgtaacaatattcacttttacacgtaacatttttcaattttgctgcgtgcacttttcatttttacacgtagcatttttcaattttgctacgtgtcccgttaaccatttaacaaaaggaggaagaaaatgatcaccaaaaaaatcggaattatcggatgtggcaatatgggaggcgccattctatatggagcgctggaaagcggggttcttccaaaggaaagcgtctatgtctatgacattaaccctgccatgatggaaaaggccaagggatggggcgtaaacctggcaaaggatgatgaggaagtatgcagcagcgctgacattgtgcttctggcagtaaagccgcagaatgccgcagaggcactggcacagtgcaagaaggcattggagggcaaggccatgatgtctatcgttgctggagttactgttgaacgtctgcaggacatgatcgacggtgctgccagaatcctgcgtatcatgcctaatacccctgcaatggtattcgaaggagcctttgccctctgctctgacaatgatttcaacgcagacgaactggaggctgcaaaggcaatctatgagtccattggcatcgtagaacttgtgccggaacacttaatcgatgccgtatgcggacttagcggcggaggacctgcctatgcagccatgttcatcgaggctatggctgacggcggcgtaaagcaggggctccccagggctacagcttaccgcctggcggcccagacctgccttggaaccgccaagatgattctggaaaaaggcatccatccaggcgaactgaaggatatggttacttctcctggcggcacgacgatcgaaggctgcgaagccttggaaaagggcggtatgagggcagccgttatcgaatgcatcaacgctggagccgaaaagtcaaggaaactgtagactaagaaacttatgagtgtacatatataattcaggtctcattctgccggttagatatcataagaaaaacatcataagagaaatatcataaaaggaagcgttccccgggcggcgccgaaccgcccgcccacaaacgcttcctttttgtttacagtctaactaatactcatcatccacccgcagccgtcctgcaatgatgtgaaatatcaccgccacgccaatcaggcatgcggccgctgcctttcccgacgtggttgccacagttgccaggatccttcccagaaatggaacggataacgctaccttgcccagtagttcgtcataatcgacaggcataggatccttcttttcattggcatcgccttttgtgataaatttaccggatacagtctggtttttcaccacccggtgggtgacgatcgcaccgctatccgtgcccctgtaaaatgcaatgacatcctcgttctttacctcttttggaggaatctctttcgtatagatcaggcttcctgtggggatcgccggctccatgcttccactgatgaccgtatatatatcatagccaaacagcctgggaactgtatctgattatgatggtgttacaaatcaactgactgaaaattgcagtaaaaaaatgtcatgcagtgtggataacttttccgaatataatcaaaaaagggtacaattatataattcaataaaaaatatcatttagccggatacagtaaacggcaaatttctaaaatattacattgtagcagaaacacagtaacaaaatatctttatggggattacgaagctctttgcaaaaaagatttccatagcggcatggatcagttttataattatattatcaaagatctaacttctggtgtcagtcgaaaaggtgtatatcgcaatgttatagaaaaaggatataaaggtggtcaatctgcagcatatgattatataaataaaatcatagaacgatttcaaattgatgttgcaatttacaaaagttgtttacctgaagcaatccaaaagaaaaaggcgttacaaaaatatgaccacctttcaagaagcggcatattccgttatctttggatgggcgttgaacttatgcaaatcatacgacatatattttgcagaaatatcctgaacttagagaattaatgcgttgcattcgggaattccgtgaagtcataaaaagaaaagtatgcactattatattcgtttatagaacgatacaaaaactcagatttaaaagagttatcccggtttacggataattgcggaagaatcccctgcttactccgttttccggttatgcaatagaatctgcatcatatacgtaaattgcgtctcgcttaccttatttcccaatacagattccccagcataaatcatggaaaaactgccaaacatctttacgtataatacattgtctttactttttttctgttccattggcacatcccttttcaactattttccaattgaggcatcattttagtatactttgctaatgaatagtatcattataactaatttacgggaacgttgcaataagttgcgtacacctatatccatatagtcaatgattatctatcaaatgacgaaattattactttttttgtttaccattcctgtcattcggtgcatattcctgatgcagagtcaaaaaagagacggccttttgtccatagaccgtctctttcatcaatgtgcttcttatttgccctgcattttctttataaccttcagccgcgtgaattcttccctttccttttcttccagcgcgttattgatcgtatataccagattgctgtacatagggatagtaatatttttaagcgcattggcacgcttctgggtcttcttgatattcgtcgccagccggtatgccgcgttctcgaccatcgacagcttgatggtcagatcctttacctcccggaacgcctcacggacaatatcaatagactcatgcgtcgtactgaatgcataggtcaggtcattctgcttcgcgtcatacttcacatatggtatctccgtccccatgatgctgcgggtctggatccggattgaatcctcgatggggacggtaaatgccagttcctgaaccttgctgattccatgctctatattggctctctgcaggcatgcataggccttagtaaaggtagtatcgatctgttcctgtatatctttggcctcatctatcaggctcatcaactctttcagcagaatgttgcgcttcttatccatcaggtcatatccctggtgggcaagggcaagcgaattcttcgcaagcattaagtttcctttggttggaaattcccggggatccatataccgacttcctttctgtcaaaatatcgctttatccttaagcctcctgcgcctcttttggataatatttgtctatcagttttgtatcgatacgatccagttcctcttttggtagtagccctaaaagctcccacccaagatctagggtatcctgaattgtacggttctcggtagggccctggccgatatagcggtgctcgaactcctctccaaacttcagatactgcttatcaataggcgacagttcatcctcaccgataacagaagccagattcctggcctcgcctacttttgcataagcagagaagagctggtttgccagatcctgatgatcttccctcgtgtagccttcgccgatcccatccttcatcagacgtgaaagggacggaaggatgctgatgggcggatagatggcctggccatgcaggctccggtccagaaccacctgtccttccgtaatgtacccggtaagatcaggaatcggatgggtaatgtcgtcatttggcatggtcaggatcggaagctgggtcaccgagccgttcgccccttctacaattcccgcacgctcatatatggtggccagctcgctgtacagataacccggatatccctttcttgacggaatctctcccttcgaggaagacacctccctcatcgcctccgcaaatgaagtcatatccgtcaggatgaccaggatgtgcatattacactcgaatgccagatactcggcaaccgtcagcgccaccttcggcgtgatcagccgctctactaccggatcattggccaggttaaggaacatgcagacgtggtccgacacgccgctttcctcgaaagtcttctggaagaactcggcgacatcatgttttacgcccatcgctccgaataccaccgcgaactctccttctgcattatctcccagcgatgcctgctttactatctgcgcggcaagctggtcatgaggaaggccatttccagagaatattggcagtttctgaccacggatcaatgtcgtcagcccatcgatcgcagatatacccgtacggatatagttcctcggatattcccggcgaaccggattcaggggcagcccgtttacatcccgcctgtccgtcgaggtaatcggccccagcccgtcaatcggctccccgattccgttaaacgtacgccccagcatatccggcgataccgcaacttccatcggatggccggtcagtttcgtatgggtattggtaagagacatattctccgtcccttcaaatacctgtataatagccttgtcttcgtccagttctacgatacggcccatctttctcgtgctgccttcgaccacaaactctacaatctcgtcgaaaaaggcatcctgtattccttccaggacaacgagagggccgttaatattgcttaatccaagatattctattgccatgtccgctccctcccttatgcattcttctcaatcacgcgatggtagaaatcatcaatatcctttttatatagatccagcagctgcagattgtcattcggtacatcgtacttgatagcaatcactttttcatatatgccttccgccttcaataccgacattggcattcccatagccaccaactgtctggacttcttatacagatacaggattacatccatcatcttgaactgcttctccatggacacgcaagtatcgtccttgtgaaacgcattctgctgcaggaatcccaatcggatgaccttggcaatctcaagtaccagcttctggtcatccggaagaacgtcccctccgatcagctttacaatctccatcaggctgctctcctgatttagaagagccatcaggcgattcctgtaatctacgaacttcggcgatacataatctgagtaccagccgcttaagtcattcagatactcgctgtaactggacagccagtggattgccggaaaatgcctggagtaagccaaagttttatccagcccccagaagcacctgacaaatcgcttcgtattctgcgtaaccggctcggagaagtctccgccttgcggggataccgcgccgataatagatacggacccggtcgacccattcagcgtctgcatcattcctgcccgctcatagaacgcagaaagacgggatgccaggtatgccgggaatccttcttctgccggcatctcttccagacgtccggacagttctcgcagagcctccgcccacctggaggtagagtccgccatgatcgccacgtcatatcccatatcccggtagtattccgccagcgtaagccctgtatatatagacgcctcgcgggccgccaccggcatgttggacgtattggcgatcagcgtcgtccggtccatcagctggttgcctgttctgggatccaccagctgggagaattcttccagaacctgtgtcatctcgttgccacgctcgccacatccgatgtacacgataatatctgcgtcagaccactttgcgatctgatgctgggtcatcgtctttcccgttccgaatcccccggggattgcagctgtacctcctttggcgatcgggaacatggtatccagtattcgctggccggtaatcaatggcacgctggccggatatctgtgatgtaccggcctgggaacgcggattggccacttctgcatcatggtcaattccttcctgctgccatccaatagttccatcgtcacgatcacgtcattaattgtatactggccatccgagacaaccgagattaccgtaccttccatgtccggcggcaccatacatttatgcaggatcgcatgcgtctcctgaacctccgcgattactgtacctccatgtagaacctcgcctggcttcacggtaatgtgggtatcccataatttctgcgtatccagggaatctacgctgacgcctcgggtaatgaacgctccgccagaatcggcaatcttctccaaaggccgctcaataccgtcaaatatattgttcaagataccgggagcaagcgtaactgatactgcggcacccgttgcctccacttcttcccctggcgtaaggccggaagtttcctcatatacctggattgttgtcagatccttatccagggaaatgacttcgcctaccagtttttcctttcccacatataccatctctgacatcttgaatccagtcttgcctttcagatagataacggggccattgatgccgtagatctttccagtctttacactattcaactcccgcacctcccttaaatacgaatttatggtactcattgtctatcgcgcccttgaatgcgcggtcgatcagaatattgcgctcatggatgactgcgcgcacccctccgataaaatcctctttgcttatggtcagcgtcatgccggtatgttcctccagatactcctttttatcggcatccgtaggattgatatatatagtcatagcttccccgcccgcgaatcttgcagccttctcaatgtacgcaaccagaagatgcttataatcttccgtcttcatatactcctgcaccttttcgtcaacttccaggaacagttcttttttcaattctttctgagtcttgctcaattccctcttaagttccaactgggccttggacatcgccatattcagctgctgactggcattaatgccttctgcttttatccgggtctccgactggcggagtgcttccgccctatgctgctcgaacacgccctctaaggcatcttcatgctgcttcataatggcattgccttcggctcttgcctcttgcatggcggcatccttaagatgttcgatcttctgttctaacgtcaagtgtatcaccttcttttattggaataggtttccctttataatcattacagtttcaggccaattgcctcatttacatatgaagtgataaaatctttcttacgtccggttccgtgcctgtcaggaatctcaatcagaagcggcatggtacgttccagcttaatctcgtcaagcagatcgggaaactctcttccgaacttctcggtaagcaggataattcccaccgtcttgtcgttcatggcattttcaatggctccccgcagttcgttgcgctcatgcactacgacgccgtccactccagccagccgcattcctgtcagggtatcgatattatcactgatcagatacatcttcatattacagtttacccaggatcatgaaggagatgatcagtccgtacagacatacaccttctgcaagacctacaaaaatcagcgacttaccgagcgcgcttgaatcttcgctgatagcgccaagagccgcgctggcggcgctggcaacggctataccgccgcctacgcaggacaaaccggtggacagcgcagcagcaaggtagccgaatcctgtagcattagaagcagcagcctgggccgtatccgcggcttttaccggatcgccggcgaacatcatgatggccgctatagcgaaggccccgaagtaaaagaatgcgttcgccccgatggcgcgcttataccgcttctttgtcttctccccaatgagaaaatagccaaatggaatgatgatgccaagcaccagtgttgcaataagtaagagttttaccgttaatgtcatgattgatatcctccttgtaattggattattatttttcttttttatgattattgaatggcttgaattcccgtccgcttcctttatagaaccggctgaacatctcatagtattccaggcgcagcacctgtatgcccacgatcaggccttccagtccgcatacgacaatattgcctatgatgactccgatccagttcgggcttccatcctgcgccccggacagcatcagcacgacttccatgatcgcggcatgactgactgcgaatgccccgatacgcacataggaaagggtgttggaaaagtagctgagcatcgtctcaaacaattcgaagaatccctgtaccaggaacatccccttgccctcttccaacttcttatggttacgcgtcaccagattggtaagcggctctttaaatagaaacagtaggatagggattccaaggaataccaccatcatgatattgcccggcaccttatgtccagtcatataaagggctaccgtcagtaccagaaatccatagaatacaagtccagcgatcccattattcgaaaaccaaatattttccgtatcatgcgcccgtatggcattgatgacatggaacagcattaccagaatattcagcgccatgccaaaggcgatcgccacgatgaatacagtgttcagctggccgatgaacggcagattcgtcattgcatccacaggccttagccatatggctggcagaacatcctcaaatccaaatacgcttccaaacatgaacccaaaaaacgcagaaaagattccggctatggaaatgattcctgcaagattcgcttttttcatcaggtagacgagtcctcctataacgaacaggcacaatccctggccaacgtctccgaacatagccccgaagataaaggtatacgtcagggctacaaagaccgtaggatccatctcgtcatgggccggaagtccatacatccgtataaacatctcaaagggcttgaagaacttagggttcttaagctttgtcggcggatctccaaagaacttctcccgatcctcttccactaccacgaacactttgtcatcattttcagactccttcaagaacgcggctacatctgcttctcccatccagccgcagaggatataatagtcctccttattgtctccttcttccagcctcgctgccatcttcctgacatcaaagttattggagagttcctccagccgcttctgtgcccctaacagtttggaggcatggcttctcatcagttcctcgatctccttgtccactgcatcgatcttctcattcgtgctgtcgatatcctgctgcaggctttcgcaagccagcgagggtgtcccgatatattcaccggaaatggatatccgctcaaagtgaagggaattgaacacagaatctactctgcttgcctccgtattcgacacaaaatagcatccatagacgaaattctcgtttcggattccctccaggaatacggcattgagatcctcaaacaaatatttctccagcttcctataataatcaacgccgatccgtccgaaccgtatcttcatataccggaacctgagtgccttatgaagatccagttccagcggcctgaacggctccattacatttaacttatccttcagttcatccctgctcttcttaagcagttctttcttctcctgcagttccagatattcatggttgatctcccggatcatggcaatcatctcatcctgggtcgtcatggaatctgccactgcatcgcttgggggcagaagggcggcaaactgttccgccttggccaagggctccttgtaaggattgacttccacaaaaggcagcagattatctgtcgtcttaagttctgtaaccgcgttttcgagctgcatctcgtatttggacaggtatacgtcgcagacgcggtcaatatccgtcctgggtccgctgatgctcaaaaacttcatctttacaatcattgaattacacctcctaagtatcctaacgtttctcttgaagataagccgtaacggatacattcaagggctgttgttagtttatatatctcttcttcctttaaaaataagtaggtatttatcgtggcaatagaatacggatcgcgcctgcggtcagtaatatacagatgcataaggcattccttatacatctgctccagagtcttgccttccatatgctgatacttttttgcataatacgtctcttccagctgatgctcgaattcctccagcgtcggggcctctacaagtcccttaaactccgcaacgcttaagcggtactgaatcggtatagtcagggaatagatatccgaaggcagcatatgataatactttttcgcccggtagatccactggacattcagcaggtcgatcttcgtgccgtaatcccttgttaaaagttccctttccttgttcttcagaatctttttctgctttctccacatggtggaaaaatagtataagtccagagccagattatagtcaaataaagtggccgcattagaatctctcagtttcttaagcggagcatagtattccgtatccttcaggctatccaccagttcgtctatgttcttggccgtgatcatcttgtcgatggaaagttttgaatacttgtcaaagaattcctttttataatccaggtcaaaaggcttatcataatggttaaatacgatccgcaggcaatagttgatcaagtcaatctcgtaccgtttccagtacacctttaagaacttcttctgctccatccccgcaaagcggaatatccttgtatagtcatcatacaaggactggtacagcaccttctccacatgccttctatgatacagggagatgtccatctgattcatatactccgcataggcaggcttttctttcagatagtcgattgcctccggcacgcttcttaaattggcaatgttctcaaaatccttatcggtaaggagcttcgcctgcatagcccggatctttgcaacgatcccgctgtataacattacgtttcccatgatctacacctctataatatgctttaaaatctcctgggcatatgcgctatgattctcttcatattcctttctcagattgtcaattgtagagcggttcttctcccgctgctcctccagaatctgatccatcttcgcttccgcctctgcccggatctcatccagcctcttctgcgtctgagcctccagatccttgtcgaactggtccctctttgcctgaatcttcttctcgatcccatacttctgggcttctgcatgttctacgattgcttccgccgtattctcgatatcagacagtttctcaataatagagtccatatgcccctccgttcctgcttatttgcatatatctatatttattctataataatactcctatttatttaaattaccatagtcaattttaacaaaaatcttctttattacaaaccctaaaccagctctttcccacattgactttttcccctcaagaagatacactaggagatatgcataaatgcttgaaaacaggaggtatacacatgcgccttagaaatattccccgcgcgcagagcgttcttagtcaatgcaaggaagtcataaagaacgagacagagcacaaaggatcctggcaggaaatatttggaaacagccatccgatccacattgagattggcatgggaaagggaaagtttctcttaagccttgcttcgctccatccggagatcaactacattggaatcgagcgatattcaagcgttcttctgcgggcggtggaaaagtttcaggatgttgctttcggcaccgaggtttctcgcaatatccgctttctttgtatggatgcccaggatatcgcggatgtattcgcccccggcgaagtttcccgcatctatctgaatttttccgatccatggcctaaggcaaggcacgcaagaaggcgcctcacttccaaagaattcttcgaaagatacgaccaggtactagccgaagatggctccgtcgagtttaagacggataaccgtctgctattcgatttctccgttgagcagctgggcgaatcatccaccttcgaacttgccagctgtacctatgaccttcaccatgacgaattcatgagccaaggtaatattatgacggagtatgaggagaaattctcatctctgggcaatcccatctgcaagttgatcgcaaaaaggaaatccccggcatagggctgcatatattaataaggaagaacttgtgtctggaagtaagcatatgggacgtagaaacaaaaagggcatgaagcacaaaatatgtgaattcacttaccgcagaagagggctgaaccaaaaattgtcctgtctgaaaaagtctatggatgaggtgtatcacacattgaatcccaagtgctgattacagatcctataagaaaggctgatactatgctacatttaacagcaggaaattttgatgcagagactaagcacagcccgcttccggtagtcgtcatgttctatgccgtctggtgcggcaaatgcgctatgatgaagccaatcgttgaggaaatcgaacccaggtaccgtaataaagtacggttctgcgaggtggaaatcgatgaatccccccttcttgccgccaaatacgatgcggatattgttcccacattcgtatttttccagaatggcaggctgcttggcatcatgcaggggattatcgacgaagtccagttcgagcagagactacagaaaatctttagaaatagttaaggcatattttctttgcaaatatagccggatatgttatattaggggagataaatgaaagaaccgcaggctgcgcgccttatatccgggccgcagcccttgcgagaataatgaaaagggggcatggtgaattacaccaggcattatgagaaagatgaaaagaatcatacccgtcatgctggcagcagtccttacctgtgccagcatgccgatggtagcaaaagcagacaactccaaggtcgtaacccttggggccaacctctcggacgaacagaagaagtccatgtatgaatatttcgggacctcctcggacaaggttgagaccatagaagttaccaacgctgatgaaagaaaatatatggaagggatcgcgtccgaagagcagatcggaacccgtacatacagctgctcttatgtggagccgactggcagcggcggtgttcaagtaaaggtggctaaccttacctttgtgacaagttccatgatcgccagcacattgctgacatccggcgtggaaaactgtaatgtagttgcagcatctcccatcgaagtatccggtacgggagcattgaccggaattatgatggcttacgaaagcgccagcggagagaagttaagtgaagatcagaaggcggccgcaaccgaagagctggttactaccggtgaacttgcaaacgaggtcgggcagcaggaagccacaaatcttatgaacgaagtaaaacaagacgttatagaagacggcttgacagatcctgacgatattaaggatgcagtggaagatgccgcgaaggacatcaacatcacccttacagacgaacagatggcaaagattgtatctctgatggagaatatctcccagtatgattatgatgtaaaggccttaaaaaagaccctggagaatctggaaggcaaggacgaaggcttctttgcgggactctggagttccatcaaaggcttcttcaccggtgattccggcgatggcggcatcattaatgataccaaggatgacattctcggcgcagatgccgtaatagacagcacgctggatgccatcaattcgcagacagaagaaaaggaaaacttctgggacaaaatcgtaggattcttcaaagacctgttcggcggaagcgatgatgaggccgatgacgcaaaagacgaaagcacaaacgatgacgcagatgtaagcgatacaaaagacagcgcagatgacgccacagattctaccgatggaacatccattgacgaacagacagacgatacggatgacggaaccggcctggacgacacggatgattctggcgatgcctctgatggaagttcggatacaggcgccgccgatacttccggaaccccagatgacggcagcaccgcacaatagcatagtatgaatgaagggatagcgtttttaagccgctatcccttttcttattcaaacatcctttattacctattcgcttacgatacgtctatctagaattcaaagatcgccactccatatgcaggcagcttgtatgcaaatgaatatggcctgccgtcacagtccttccttaccgctctatagacctccggcctctcttcccctgtaccgccatactttgcgtcgtcactgttcatgatcagcttatactgctttctcctgggcactcccactctgtaatcgtctcttgccactggagtaaaattgcaaacgaacagcagattcttcttattattcttggaatgccggataaagctgaagatgcttctataagcatcatccgcattgacccattcaaatccttcccagctctgatcctgctcatacatggccttattccgcttatagaggtgaagcagatccctgacccaattctgcatctttagatgctcctcctcagccagaagataccagtcaagctccctttcctcgctccattccctaagctgtgcgaactcctgccccataaagagaagctttttgcccgcatgccccatcataaaagcatagcctgccttcaggttggaatacttatccgctccgatcccaggcatcttattgagcatcgaacatttcagatgcaccacttcgtcgtgggacaataccagaatatagttctcgctgtacgcataactcatggcaaaagtcatctggttatgatggtccttcctaaaataaggatccaatttcatatattcggtaaaatcatgcatccagcccatattccattttaggctgaatcctagcccatcctcttctacgtcccccgttaccttcggccatgccgtagattcctcagcaatcattagtgcccccggatttcttccaagcaccacagaattcagatgcttgaagaagtcaatcgcctccagattcttattgccgccatacttgttggcaacccattgtccgtcctgcttgccataatcaagatagagcatagacgctaccgcatctactcgcaggccgtccacatggaactgctcgatccaaaacagcgcattagatatcaaaaagtttctgacttcattcttcccataatcgaatatcttggtaccccagtccggatgctcccccttcttcgggtcggcatattcataagtaggggtaccgtcaaagttggatagtccatggatatctctgggaaaatgagccggaacccaatccaggatcacgccaatcttattcttatgaaggtaattgatcatccacgcaaaatcttccggcgttccataacgggaagtcggtgcgaaatagcccgtcacctgatatccccaggagccgtcaaatgggtgttccgcaatccccatcagttcaacatgcgtgtatcccatgtcctttacatacttggcgatctctttcgcaaattccctgtaattatagaatccctcatcctccctgcctaggtgccttttccatgagccaatgtgtacttcgtatatggataccggctcctctgtgtgattccactgggtccttctgtccatccaggccttatcggtccatttcatatccgtgatgtccacaacctttgatgcggtgcccggtctcaattccgcataattggcatagggatctgccttaaatacatactctccggtgtacgtctcgatacagtacttatacatggcatattcctctaccccgggaacaaaacaggtatatatgccaagaggctcctgcctctccatagggtttgcttccatgtcccactcattgaactctccaaccacggaaaccgaacgtgcatgcggagcccagactgcaaaatatacgcccgtctttttcccattctttaccttgtgggcacccagcttcttgtatatctcgtaatgattcccctgcccaaataaataatggtccagttcgcctatttcatatggtttcaactttttttctgccatatcttcacccctcacattcctgctgcgatttactaatattatactttacggaagggtaaaaagaaagggttttgacaaatcttgcttgccaaaaccctgcttttcacttatttagattttaaagtcctcttccttcagtattatcctgtcagaatcgtccgtacttttgccaaatacccttcttgccaggtgcttaacattggctttttgggagtgcgcgatggcctcgtccatgatctctttcacttcagcaaccgtcaccgcatggtcttctctctgcattacatcaatacgactatacaatgcgagaattcccatttcgtccagtttgtagccattctctttcgcgtatgtctggccaaaggttaccagttcatcattaatgaataccggaagttccagtttggatgtaaacttcttcttaaaatccggatttgcggtcgagatacgctctaacggctttctctgatcttccagaacaaagagcagttcgccggtcttcttctccatcaggtagttcaattccttaatggtcctggagttcagttttccggccttctcgatgataatcgctccgcctcgcagtttctggataatattggtaagttccttcttatttaaagactcgcctgtaacgatggctacttttccttgcttcagattcctctgcttctggatcgccttgacaatatcaaccgcaagcaccgtctttccggagcccttacggccgataaccatcaggttgcccgtctttgaagtaccttccctctgggctctgcggtcattatccagaacctctacaatctgctcgctcatacccctgaccggaacgaagtaggagaacaatttcttctgctcttccgtaagcccggctttcagcccaatctcgctcgtagcgctaagatcataacggcccgttaccacgaaccctgtatcaaacggaactccgcccccttttgacttcttgattctagcctgaatctcctcctcagaaggctcctctatctctaattcctcttgcgccggtttttcgtcgtcctcttcttcgtcatcgtcatcgaagaaatcttcatcatcgaagtcagcctcctcaaaactgtcgtcttcgaagtcctcttcctcgaagtcctcttcctcgaagtcctcttcctcgaagtcctcttcctcgaagtcctcttcctcgaagtcctcttcctcgaagtcctcttcttcaaagtcttcgtcacttaaatcaccgatcgcttcatcaaaatccgactctacaaaatcttccggttcttcaaattcaaccgactcgtactcctcttcgtactcgctttcaagttcctcttcctcaagagcctcttcctcgaagtcctcctctgcaggcgcttcttcaattacttcttctacaactacatcttcctcgactacatcttcctcgactacatcttcctcaactgcttcttcatcaactgcttcttcatcaactgcttcttctggctgcgtttcctttgcatcttccccaactgcttccagttcgtcaaagagttctgcattaattgccagtccttcgtcaggatgctctggctcctggtaatcgacttcatcttcttccagaagcccgttctccatctcttctaccagccttacaatatcatcaggaattttctgcgtctttgcctctacgaccggattaagcagcgcttcttcctttgctgcctcctttgctgcctggcgcgcggcttcttcctcggccgcctttctggctgcttcttcttccgctgccttgcgtgccgcttcctcggccgcttttctggccgcctcttcttccgcagccctacgtgccgcttctgcttccgctgcctttctttccacttcgcggcgctccgcttccttacgctttctggctgcctcccgctccttgcggattctctcatcgtctttctgtttctgcttctctattgcttcagcattcgctttctgctttgcttcccactcctgaagaatctcctcgattcgcatctggccggtgatccgaagttcttcttccttttctttcattgctttttcttctatattaatgccgcttgctaccgccaccccatttgccagggcttcttctagcgtagccccttttactatcttggtaatagcggagtgcttctttggctgctcttctacaaagtcttcttcggcgatctcctctaccacggcttcgccagtttcctcggactcctctgcatcttcttccgcttcatccggcagcgcccggctgaccgcttctgatacggattccagttctgcttcattcagcggcgtatcgccttcgacctcttccggctccttttctgcttcctcttcatcagttttggctttttctgccacagccttgactgccgccgctgctgaatctgccgcaactgcagcgcgccttgccgcctggctcttaacggcagccgccttcttcggcgctcccggacgattgtcatacttctcctgctgaagcggtgtcagcggcttatacttcatcttaagttccatcgcctgatagacatacttgccttcactgaaccaaaggatcaggtcatcgcattcttccagacactctgcagtcatgcccgcctcatgatacagtttcgccagctcatacgcccatttttcgacatactcggctttcttaaagtcttccagcgctgtgatctgctctgtaagcggcgcgccctgcgccttcaatatcttatactttaatataaactggttcggatctttcggagccagttttacaaactcttcataacagtctgatgcttcctctatatcatcaatcttcaatgccagcgttcccagccggtatacaatcttcctgctcccgggggaacggtcaaatgcaacgaataaaatatccctgctcttctggaattctccattgtactcatatatctcgctgaccgtattcagcattgatgcattttttacccttcgccagtctatagtatctgctatctccatagcctttttatactgcttttgctccatgtgctcgagcatctgctctgtctttaccctatattcatatttatccaaatcgctcacctcaaattatttattcaaaaactgatgttatcttacatttttacttatataagtttagcataaggcatggctattgtcaaaatatacgaacaaaattgttaaaaatatattacaaaagttacaattttataaccgcccttttatatagcgttttccgtagtcttctaccttcattgccttgcctgcaagaaatccctggcctaaatcacagttcagcctgcaaaggaacttgcgctgctcctgcgtctcaacgccctcgcacacaaccttcatatccatattatgggccatctctatcactttttcaaaaataaccctcgtccgccggttatccgattccagaagacttttgtcaatcttcaggatatcccccgacacgacgctcaacatattcaaagatgcataccccgttccaaaatcatcaatcgcaagtttgaatcctttcctgtgcagttcccgcgccagtttcatgatccggttcccttcctcgataaatgccgattccgtaagttcaaaggtgagatactcatggggtatctcatatcggtccacaatactgcagaaggcttcaaagaaactgtcctgttctatatctgccctggactggtttacgctgaccggctttaactgctttccctctttcatccatttattcatatatctgcacacaagttccagcatatacaggtcaaatctatatatcaggttataatcctcaaaaagggatacaaattcattgggcataatcaccaagccattggatagttcccagcggcacaaagcctctccccccacaatattttccgtcttcatatcaaactgcggctgaatataaagtttgaattccttcttctctatggctgatgaagcccattccaggatctggctgttgttataatgctgctgcagcatccattcgctgtaatatgcataacggtcctccttcacatatttttgaatgctctgcattgccatcagcgccttatcaagcatccccttgaccgtttctgacctggtatctgtcggtatgtagatgcccgcattcagccacacctctaactcaatctccttaatccatccgtctttcgtcagttccctgcggatctcctccatcctgcggcgcatgctgttctctccctcgtaaaccagcagaatggaaaagatgtctttctctatacgtccacatacttcccttctgccgcacgcctcttccaggtttctcgctatcgtttttaatagccggtccccggtagaaaagccataggtccgattgataaaccgaaaatctctgataccgaattttatcacggcaaatttctgatcgtgataacatttaaatatatattgcgcctgctccacaaagccttccatattattaattcttgtcatggaatcagtccgggcttccttctttattacgtcattaatcttattatatgtatttttggccacctcagcgttaaaggcagcaagccctgccagcctgtcatccggagttgattgatgaatatgtacggccttccagtccccatcctgccttttccatacaatggatatccgtgtatctatttcggtcatgtacaattctttcttcggcgtcctgaccttcaagatcgcaagcgttactcctactcgttctgatacttctattccatagtgccattcctgcaatatttcatatatcccgtcagtcactttcatctccatttccatgactttaaggacctcatcttttgtcaggcatattctgtccttgctgatgccaatccaggtaacgtcatctgccaggtactccgccatctgatggtaatcgtgctttctaaaatacagatcagccagtcttgctgccctattttctaactcttccccttcgtgattcatgcgtatacctcctgacgccgcatccccatgcctatccttaagtcatgctggctgctcatctccattatgtccgaaatccattgctttttcaatggaaacatcatatattatcaaaaaaatagccatcacaatctttcatgattataatggctatttcttatttaattttatcatattcttttattctaatcggagggtctgctttgattctatcgttcccttatgcctttctccttttaatcaattaataactcaaagtcttagatcattatatctcagcatctactataaatatttataataataactgctatattaacctttgatatcattatttatatccctctggttactatataatccagcctgtgatggttattaatatctataaccgtttcaattatagccagtatccttatcatttgtctataattgtattaagttattccttctataaccctagcttacatagttatataattctgatatattaggtaatgtttcttcacacatcttctaatatctttgaactattatgtggtattattttcaatatgtctgcaaatatgaatcttatattctttccggtttgtcttctccgacttcactttcattcaattatctaccggttaatatcctctatggttaaggcttattctacgggaacttttatttgccataccactaacatattgagatattgattctgttaaattgtccaatggattaagcctcctttaatctaatatttccaaatgcaattacatctcaccgacatatgaaatataatttctcaaatcctttaaaaaacatctccatacattattgataatatatgcgacatctttccaattccctttctcgtcaggaactttttggatctcccttggattgactttataatatcaccgcgctccatatttgtcaacactatttttaattttttattattttaatttataaatcaaaattattttataaattatctgttttttcaaaaataatcattaaattcatgcaataatgtcgcttccaattgttaaccttgcatatttaacagttgacatattggcttctttcttttatacttcatctatagcaatgcaggataattgcgcgcatgtcctgcctcatcttttagaaaggagtccgtactatcttctgtacggtaagatattatgaataacattaatactacaaacgcagctggcaagccctctccacgcagactggtactgatcgcaatgatgaccgccatcacctgcatcctcgccccattatccataccaatccccgtaagccctgtaccaatcagccttaccaatctggtattgctgataagcgtatatatcctaggctggaaggatgccagcatcagcttcatcatctatctccttcttggcctggccgggcttcctgtattttccgggttttccggcggattgggaaagatcgccggtcccaccggcggatacctggcgggctttatcttcatgactgtgattgccggcctggccgtggatattttttccggcaggcgtcttcccgcagtcatcggtatggcgctgggcactgccgtggcctatgcgtttggcactgcttggcttgccatccagatggatcttacatttatctccgcactctctatcggcgtactcccctatctggccggagatacgctaaagatcatattggccgtaattgccggtcccatgcttcagaaaaggctgcgccccttaaatctctaaggggggcagcctttcttcttacagaataatgtctccgatcttcttataatcctccaggctatatgcctctatgatattgccctgcaccacatacagtacctccttaatatacacgcctctggcgccctgcactccatttccgttaatctcctcatccatattgcagacaaatccgctgttgtcgtcataagaaaacagataatagtgccggcctccctgagtgtatccggcaaatccgatcagattgcgttcctggtcaaccagcgccgccttataatcgtatgatacatccgtgctatatacattttccagcacgtaggtgtctgcctcttttacatccgctttattggaaatgtcgaacatcgtcaatttgattccatccgttgactgagccttttcatccacgtccattccaatcccaagcagcctgtcttcgccatagaaatgaagatactctgaaaaacctggaatcttcaatgccccaagaatcttaggattcttcggatcggacaagtccacgctaaagagcggatccatctgcctgaatgtcacgaaatatcctgtatctcccatgaatctggcggaatatacctgctcatcttcagccaaaccttcaatggagcctatgacttccaggttcttatccagcacatagacgctgttatcatcaccttttgtcgtgaccacgcgcagatttccttcgtattcatcgatacagaaggaatccttcagatagccgtcaaacttgccctgggcgatcgcctttagttctccgtttttgtaggctactttacggaccgtcgtagtatctcccttcggatatccccactgcgtctcgtagaaatagatattctcattgctgacatatgcctggccgccattggagaatatggccttgctgtccttggtttctttcggatgatcgagatcaacagatgtaatcacttcatacatatttgcctgcaataccggaggcagaaagatgtcgtctttcgctaaaacttctccattaaccattgggacaaatgtctcaggctcgctctttctcagttcctggcccgtatagaattcgctgaacaagtacaagtatccgttcgccattcttgaggaactatagttcccactctgggtcacccgtccctcctcccggggtgatgaagcgtcccggacatcataggtgacggcttccacagattgcgtattataaaagcctctgccggaaggatagtccccatcttccaaaacatcgaatttgctgcagatcaataccagttttccggaatccggctgcagataaatctcctggatctgggatgcatcgtcagccttaatagagccggcctcttccatatccttgccgtctgcttttacgatcgacacttcctgcctgctgtctttcagcacatacagatattttccatccgtcttaaccacatcgccttcttccacgccttcctgcctgacattggtccgggagtattcggcgctttcttcatgggctacgcccgcatctgatgacttagttccggcattcggcgctgatgacgcgtttccggacgcgttatctggcgctgtgctttccaaagtcttggttcctgaatccgatgtgacgaattccctcgtcttcatctccttctggtatctctcaatatactcgtagatctcatcataactgttcgcgctggcaatctgcttgctgtcgctgatctgactgcttctagagcctgacggcttgcttttatcaggggtcccctccctacttccccatacggctcccgcaatcacgacagccaggcatgccgcggccagcgctgtgacctggtatggacgcagccgctttttctgcttctttccttccagcatctccttaacatgatccgggctcagactgtccgcagcctttatctcgtctgcccggtccttgattctatcgatgatttcccgctcttttctatccatacaaccgcctccttcgactcatttcaagatacactccatcttctgcaatgcacggcttcgcttggaacgcaccgtgttcgggttcatgcgaagcatctgtgcgatctcctggctattatagcccgcgaataccgacaggcccacaatctcctgctcttcgtccgacaagataaagaatgcctttctgacatcgatcatctcactgtagtccggctcttcggaagcaaacagtgtaaatgcctccccggactgttccatcttcctggacgctttttttattttttttctgcagatattagccaggattgtgaatatccagttcttaaaggcgtctctgctccgaagcttcccgatattctcgtaagcggctaccacagcttcgctgacagcatcctccgcctcctgccggtttctcattatgcacacggcaaaccggtacaaatccatatagaccgcttcatacatctgcgcaaatgtctctgcattacatctcatatcttatcctccctgtcagatatggcttatggttctggtcaggttcctgttatatattagagtcgaaaaacagcctaactgttgcaattggggacgcagtaattttattctaccgcgtccccaattatcttttttatcctgtctctatgaaatagattagtctctgtagtaattgatcaggcagcccttcaggataatctccctttccgcgtccgtcatatcgcccagctgcagatggatttccttcaggtcttcccctaccacgtaagccttaatatccgccgccttctcttccactgcctttctgatatccggcacgaacagatagtctccattcttgaagctgaggctctcatgatcttctttggtaataaacggaagcatgccccagttgatcagattggagcggtatctcttggtagcgtactcattggcaatgttcgcccatcctcccagcactttctggcaggacgccgcctgctccctggcagagccgtctccaggcttcactgcgaatatggtgcttcctactcccaggttgccttcgcccgcctccggataggccttacgcaccttgtccataaccggctttaattcgtccagcacttccagcgggcactgtcctgcctcgatcgctttctgcgctttctgcacttccttggctcgtcccacataagccgggtctttcctggatagtgcaaattcggccagccccagcggattggaacgataggaagacgtctcgcccgacggtatcaattcatccgtcgtggttaccgggtcatgaatctctgagacaaccttcagcaccaaattctccggcagcgcaggcatctgcggccagtccttaatattcggcccgaacttgatctccacggacggatctgccacgcccttgctgtcaaagacacggttcgcatagatattcttatcaaaatgatatttccgtcccacgtactccacatccatcgctgtggcaggggtaaggaatcccttgtttgcagccgtcgccgcaatagagcgggcatccataagagccacggaagcaatctgtccgctctggagtttggagccttctctgttcgggaagtttcttgtcgagtggcggatggagaacgcatgattggcaggcgtatccccggcgccaaagcatggtccgcagaatgccgttttaacaatggttcctgcttccatcaaggttgcaactgccccgttcttcaccagttccatatagatcggggtgcttgccggatatacgctgaatgtgaactcatccgcgccgatgtaacgccccttgatgatatccgccgccgcacagatattctcaaatccgccgcccgcgcagcctgcgatgattccctgctctacatacaatttgccatccacgatcttatcctgaagcgtatagtctaccgctttgtccaggctgaccagcgccttttgctccacgtcatgaagcacatccttaaggttggcgtttacctcgtcgatggtgtagacgttggacgggtggaatggcatcgcgatcattggcttgatctcgcttaagttcacgtataccatgccatcataatatgtaatggcccccggattcagttcctgatactcttccactcttccgtggatgtcatagaattccttaatcttctcatccgtccgccagatcgaagacagacaggtggtctccgtcgtcataacatctatgccgatacggaagtcggcgcttaatttggagactcccggtcctacgaactccataaccttattgttcacatagccatttccaaaagtcgccccaatgatcgcaagcgccacgtcctgcgggcctacgcccactgacggctcgccatcaaggtagattcccactacgcccggcatcttgatatcataggtcttattcaggagctgctttaccagttccggtcctccttctcccatagccatggtgcccaatgcgccatagcgggtatggctgtcggagccaagtatcatcttgccgccgcctgaaagcatctcgcgggcatactggtgaatgactgcctgatgaggcggcacatatacgccgccatacttcttggcacaggtaaggccaaacatatggtcatcttcattgatcgtgccgccgaccgcgcacagagaattatggcagtttgtcaagacatagggaatgggaaacttctcaaggccagacgcccttgccgtctggatgattcctacaaacgtaatgtcatgggaagtcaacttatcaaatttaatctgaagcctctccatgttccctgataaattgtgagcttcaagaatcctgtatgccatcgtatttctggctgcctcttcctgggatacttcctgcccggtctttgcctttgcctcttcggcgcttttagcaatctctgttccatttaacagatagactcctttatcaaacagtttcaccatatcttgtctcctcctaatcattcatatacttcatgtgatctgctaccatcatggcaatcttgaatgtcagcgcatcctcaaacacacggacatccagtcctgtcttcttctggatcttctccagcctgtacaccagcgtattgcgatgcacgtacaactgcctcgcagtctcggatatattcaggttattgtcaaagaatgtatatactgtcgtcagttcttcctcctcgaactggacggccacatccccgtcaaacacctcttttaaaaacatctcgcacagggacgccggaagctgatggatcagccgcccgattcccagttcactatatgccagaatgttcttatccacatagaatactcttcccacctcaagcgccatatctgcctctttgtaggatctggatacctcttttaactcatccacaatggttccgtaagatatccggacgcttaccatggcttccatattcagcgtatccacaagcactttcgctatctggttcaactgtccatagccatccgtattctcaagggcctttaccagaattacatgcctctcgtcaactgctgtcacaaaatccttcgtgccggtggcatataaccctttaagcgtctccagaatcaggctctcaccctcattcttggcctcgatcagaaataccgtccgtttaagttctgtcggaatcttcatcttcttcgcctggttatatacatctaccagcagcatattatccagaataaggttctggataaaacgattcttatccattctctccttatatgcatacagaaggttggcaagctggctggctcccatctttcccgctatggacatccggggatcctgccccgccagcgccagtatataggccggctcgtcttcgtcgcatacaaggaacagcccggcgtcttcccccgcctgttccggctctttaagcgccttccggcagaaagaggccacctctttttccagccccagcatcctttcgctggtcattacaagacatttggcatccatatcccagacgccgcactcaagccctgtaatacgctttatatcctgtactgttttatgcaatatctgattcgataacaatcgttaccctcctgttctgctaaatgcatgttctattctaccatatgttagaaatcatgtctaatattttgccctttccctttggaagtaaatcactgttttcaatccaattgtttcattttctcacttatgttatactttaagaaaatgagggtggaaaattttgtcagcaggcaatatcaagacatcaaaaaagagtttgcttacatgcaatgtatcgaaagttttcaaaagaatgaccttaaagcggtaaaggaatatgacgcggaatttcaccgttttataatccataccaccaagaacagtcgtatagaagcaaccatcagaaatctaatcaaacttagcaaatgcattgttgtcaaatccgatgacagcctttccagccaggatatagatgcgctccggcagtttctgaatgccctccgggattcaaacgaatctttggcggaggaacttatgcgaaagcgcgtagctgcttctaaaaagtatcatttcaatcggtattatatgggagaatataattaacattttcaatatcatcagtaaggccagggattcgtaactcaacccctggcctttttctcataattatcaacactctattagtttgtaatcgtcagttctgtctctttgtcaaatacatggatcttctcagcatccagggcaaacttgactgtatctcccgttcttgctgtcgttcttggatcaactcttgcggtcatgttagagccttcatagtcaaagtacagatatacttccgcgccaagcatttcatatacacggattgttgcttcgattaccgtgttcggagacgcttcaataaacatctgctcatcatgaacatcttccggacggattccaagcactaccgtctttccgtcatagccgccttcgataagcttcttgccctttgccggaggaagctcgatctcggaagggcctgcagcaagccataccttatcgccttttaccttgcatatagcgtcgataaagttcatctgcggagatccgatgaatcctgctacgaacaggttgcaaggataatcatacagtgtctgaggagtatctacctgctgtacgataccagcattcataactacgattcttgtaccaagggtcatagcctctgtctggtcatgcgttacatagataattgtggttcccagtctctgatgcagcttggagatctcaatgcgcatctgtccacgaagttttgcgtccaggtttgaaagaggctcatccataaggaataccttaggattacgcacgatagcacgtcccatagcaacacgctgtctctgtccgcctgacaaagcctttggcttacggtctaacaatggctcaagatccagaaccttagccgcttcgcgaaccatcttgtcaatctgatcctttggcacctttcttagtttcaggccaaatgacatattatcataaacggtcatatgaggatacagagcatagttctggaataccatcgcgatgtctctgtccttaggctcaacgtcatttacaatcttgtcaccaatcttcagttctccggaagagatctcttccaggccggcgatcattcgaagcgttgtagatttgccgcatccggaaggtcctacgaagatgatgaactccttgtcttcgatctcaaggttgaagtctttaaccgcctcaaatccatttggatacactttgttaatatgtttcagtgataaacttgccattttgaattcctcctaaaaatactttcgtatctatgatatcgtttcgttctgttacaaagtatataaaaaaagtccaacttggggtatgcccaaattgaacaatttttttctggttttctatacaagttgaccaaggaagaattttacagcagcgcctggtagatatcgcgcttgcttacgccccggtccttggctacttgcttcatggcttccttcttacccatgccccgctcaagataatattccatatgcgcttcaatgtccatttcttcccactgggccttttcctctgccctgatctcttcgcggctctttccctcgatcaccatcacgcactcgcctttcggctcctggctctcgtaatagtcaagcgcatcctcgatcgtggtggcaaataccgtctcatgctttttcgtcaattccctgcatacgctgagcctgcggttacccaaagcctcgtagagaaccttaagcgtccgggtcagccgatggggcgcttcatagagaatcatggtccgggtctccccttttagttcctccagtatggcctggcgctccttcttatcggtcggaagaaaagcctcaaacgcaaatcttctggtagccagtccggatatggtaagcgccgtgatacaggctactgctcccggaagggcagttacggttattcccgcctcctggcacatgcgcactaattcttctcccggatccgagatgcccggcgtccccgcatccgtaatcagggctatatcttctccactttgaagccgttctgccagcctgtgccctttttctatcttgttgtactcatgataactggtcataggggtcttaatctcgaaatgattcagcagcttgatgctgtttcgcgtatcctcggccgcgatcaaatccacctcttttaggacacggatgcatctaagcgtcatatcttccagattgcctatcggcgttgcgcataagtataatgttcctgacatgtcttctccttttagccccttttaaaggctagtccatcccatatattttcatcatttcttccgtatattttccatcctgctcatacgagatgagaggcggctctaccttcattctgggattgcctccccgcagaccttcaagcagcaccatattgggctctttatccacgaatggatacaccagccgcatacgcttcggctcaattcctgcggctgtcatcttagaaagtatctccggcagcctgaatggccggtggatcatatagaatcttcccttcggcttcagaagcctggcgctctcccttaaaatatcatccagcgtacataggacctcatggcgggcaatatacaaggcttcattttcattcttcagcccgtgatctccgatcatataggggggatttgtcgtaattacatgaaaagaggccgccccaaatatggcggatgcctctttgatatctcctgtgataatgtccaccttgtcctgcagatgattatgtctaacgcttctgcgggccatatcggcgctttcttcctgaatctcaaggccggtataatgcgccccttcattcttcgcttccagcagaatcggaagtattccagttccgctgcccagatccagcgccgtctcgttcttcttcaccgtggcaaaagaagacagaagtatggcgtccatgccaaagcagaagcgtcccgggctctgtataatctcatatcctttaatcatcagatcatccaggcgctcgttaggctttaaactattcatcatccagttttgacgctccattcttctcttccagcgcctttagctgtgccaattcttctttggataatttcacatccttcttcttgcgctttggcttgaatctaagttcgctggctttatactcacggatctctttttcatcattatccagggttacgataaccttcacctgctgccgcagcacattaacagactgcacatcgcctctcaggccttccggcgtagttacatgatctccattggaaggaagtcggctgttcaattcttcataagtctcttcctcattggtcaggcagcacatcagcctgccgcatacccctgatatcttagaagggttcagggatagattctgctctttcgccatcttgatggataccggcgcgaattcagacagatacgtattgcagcaaagcgaacggccgcagatcccgattcctccccggatcttcgtctcatctcttactccgatctgtctcagttctatcctggtcctgaacacgctcgccaagtctttcaccagttccctgaagtcaatcctcccgtctgcggtaaagtagaaaagcaccttattgttgtcaaatgtatactccgcgtcgatcagcttcatctcaaggccatgcttgcggatcttctcaaggcagatgccaaatgcttccttttccttttccctgttcttttcttccttgcggatgtcatcctgggtcgcaatacggatgaccggcttcagcggctgggtgatcttgtcatcctctacatccttctggccggtgactaccgtgccaaactcaacgcctctggccgtctcgacgatcaccttatcccctgtatgaatattatatttccccggcgcgaagaagtatatcttccctgccgggcggaaccttactccaattactcttgtcatattgttaattctcctttattgtcaggaacaacagttccattaccagatcaaagtttacattggcctttaatctggctttggctttttccaggctttctatgataagctcgattccttcataggaacttctcttagcccgttctttgatatattttatctggtctttgaatacgaccttatccatatccttggttgctttatataataagacatcccgataccatatcatgataatatccagatagtcattgatttccaacttatatgccgtgatccggcttaccgcctgcacgatctcgcttaactccatctcattgatgtacttcagcagctgcaccgcctcatcacggatctcattaaaatgttcggaattcgccagcataatggcacgtcccatatttccctgggcaaatgcagtgcacatatccgccttataatccggaacctgcatggtctccatcagatacttcttaatcagggtatccttaatattacgcagtttcagcattacgcacctggaattaatcgtcggcagcagcgtatccgcattctctgtaagaagcatgattaccgcatattccggcggctcctcgatcgttttaagcaaggcgttctgcgcctgggtcgtcatcatatctgcctggggaataatgtataccttatatggtccctggtagggctttatcataatcgtattattcacctgttcccggatgtcgtccacactaatagaattcggcttctcgtgtgtaacctttataatatccggatggttgccgctttctgcctgtctgcaggaatggcattcattgcacggatccggcccgcctttctcgcacagcaatgtggcggcaaacagattcgccagcatcttcttgccggctccccgctctccattcaatatataagcgtgggacaccttgtcctctcttaccgcattcctgatataattaataatgtctttgtggccaaccacatctttaaacgttcccatgtcgtatttcccctataatttcttctaagcatcgtgttctattatcattcacaaatcttttctgtatcccaaggcttttcagattctcttctgcgaaatccttcgtgtctgcaagaaatcttctgcataattccgcgtatttgggcgtctcctgctcccgctcccgcgccagagccctggcaagccgctcgccgtcttctacctcgatatagatcggcgccagtttatcaggcccataaaacttctgcatccgttcataagactgaagggttccgattaccagatagtccgatgtatcaaggttgatctggccatcatcaacggtggcatacttccagatgccgtgcaccgtatcataggcgcgctgctctatcaccttcccttgattctcatatgcatttaatgtatcctctgaaacgaaaaagtattctacgccgtcccgctctccttcccggattggccgggtagtatacagcgtaatcgtctgaagccagggcaatgccttcttgacttccttaaacagcgtatccttcccggaagaactctttcccatcatataataaatcttacccatgcatccaaacctcaatatactggtcttctttcaatccttcgatagcgaatcttagattatgataccattgtaacatatctgccgcctcttgtgataccctttctcccggtacgatcaaaggacttccaggaggatagagatatgcatactccgtggatatataccctacactatccctccacggcaaacgccggaccttgcttccaggtactgcgctgattgcagcctcatccagcatattctccatcacagaactgttatataccacttccggcctgggcaggctcgcccctataatcctgggcgtttcttccagacaattccccgaccgcatccgttcgtccgcctgggcgtcaatctctttcagcgcccttgccagacgctccatgccatcctccgtgtctcctatggatgtcattgccagaatataagtcccggctaccatctccatctgtagatggtattcattcagcagtatcctgtagagccttttactgctcatgtcagcatgccggacagatatgacgatcttggacctgtcaaaattctccgtctccaccagttccaggcgtttcagctgtctaagcctcccccgcatcttctccagcatcttgacataaggatcgaatagttcttttcttctgttttccagcatatcgatgcaggagtctatgctggacatcaacacataagacgggctgctggactggagcatccgcagatattcccggactcccttgcggcttgcaaggcttccattgatatgcagaagcgcagtctgcgtcagcgccggcaatgtcttgtgaaggctgtggatcacgatatccgcccccctcgtattagcattctgaggaaaatatggatgaaagccaaaatgcgctccatgggcttcatccacaatcagtggtatgcctttttcatggaccgcttctgctatggcttccacatccgataccacgccgtcataagtgggcgacacgatgaccactgcccggatggaaggatacttatcaagggcctccctcacatcgtctacggaaacctctgtattcaactgcgcgcaatgattgaattcaggatacagatacactggattcaattcattcatgtatatggcatgatacacagacttgtggcaatttcttgccacaagtatggtatctcctttttttgttacgccggcaatggcgcttaaaattcctacggtacttccattgattagaaaatgagtctcatccgcatggtatatcctggctgcccggatctgagcctccttcaggatcccatccgcatgatgaaggtcgtcaaatccctcaatctccgtaatatcaatcttatagggaaccgtggacttgagcatgtccagattccgcttatggcccggcatatggaacccataatagtctgagtcgctatagtcttttaacttatcatatatcgtgctcattataatctctttaataattcttctctttccttttcaaagcccggctttccaagcagcgcgaacatgttcttcttataactctccacgcctggctggttaaatggattcacgccggatatatatccgcttacgccaatggcaaattcaaagaagtagaacaactgccccaaagagaactcatcctgccttggaacattaacaatcaggttcggaacatttccatccgtatgggcaagaatcgtgccattcatggcgcttttgttgacaaaatcaaccgtctgccccgccagatagttcagtccgtcaaggtcgaccggctcttcctggattctaatctcctcggcagattcctccacattcaggaccgtctcaaacatgatacggcttccgtcctggatgaactgacccatggaatgaaggtctgtggtaaggtcaacagatgccggatagattcccttctggtctttgccttcgctctccccgcagagctgcttccaccactcggatacatagtgaaggcttggctcgtagtttgcaagaatctcgatggatttcccttttctgtggagaatattgcggatcgccgcgtacaaaactgcatcgttgctctcgtacggatcgccaatcgccctctctcttgcagacgctgcgccttccattaatttctctatatccgcgccgctgactgcgatcggaagaagtcccaccgccgtcaatacagagaagcggcctcctacgtcatccggaactacgaaggtctcatatccttcttctgcagccaggttcttaagcgctccccttgccttgtcggtggtagcgtagatcctctttgccgcttcctccttgccgtacttcctctccagcatctctttaaaaatacggaaggcaatggctggctccgtggttgtacctgactttgagataatatttacggaaaagtccctgtctcctaccacatccatcagatgcttgaggtatgtactgctgatgctgttgcctacataatagatctccggagtcttacgaatttccttagataccatattataaaagttgtggcgcaagaactcgattgccgctcttgctccaaggtaagagccaccaatgccaattacaaggagcacttctgaatccccctgaatctttgccgctgctttctgaatacgcgcgaattcttccatgtcataatccaccggaaggtcgatccagccaaggaaatcattccccgccccttcccggccaagaagttctgccttcgcctgttcagcgatcttcttcatagattcaatctcatgctctgaaataaatgtctttgctttagaatagtcaaatgttactttactgttcatagtgaccccttccttccatctttccatcttataagtatgtactattttattttatcaaatcggccacttttaatcaagccataaactcctccagaatctgccgtatcagcacgtcttttgctacttcttccttctctttttcccttcttgccttccggtctgccgatgcagcctgaatctgcggagccacatccggcacctcatatggttccggcatggtcggactggtaatctcaggaggcgccgtaggcgacggcacttcttttctcggcattggcctctccggctctcccctatcgttcttatctgttctggaggatttcttctgatcctcttcttccctggctgccttcactacctttgccgccttctggcgcggggtctccggctcattctctatcgcaaatatgtcctcgccatccccttcctcccaatccggcactactccaaattcggataccggtgtctccggagccattaccttgatctctttctggtacgccttttcataacggtgcaggcatacattttccagatagtcaaccatatagttctgcactgcctccatgcggtattcctcgtccgtggtcagatggaccagatagatcagaatggcaagcccggcgccagcagcccctgtcttaatcaccatgtcgcccattccatttaccgcgtactcaagaagcgcccccgccgctcccagtatcaggcacagtccggccgtggccttctccatccgcctccagctgtgcagcttcattcctacaaccttgtactcatacaagtacttgtctacaaacaccctgacgttttccaccgtatcgctgatcatgcaggcatgttcgaatttggcgcgcaccaggcgcataagcgggtgggtacttttattcatattcccggctgcgcgcaccagctgtttcaaagttacatttgcaatcagtttactcacaatccctatgaccgtcaggattcccattagcacgaatatcacgtgcttgtccagtataatttctaacataaaaaagccctccttttgcttagaattatacttgaaattccaaaggagggtataaaaaccgttctacagattctgacccctgatgtggaggaatctgtcagattcttaagaatcttcgtccggccgtaattatatcattgtcagcaattccttcataagccttacgctgtgggcgatcgcctgcctttcaaaggtagggtaatccatggtcgcgctgttgtcggctttgtccgaaatggcacggattatgacatacgaaactttgttcaggtacgctgcctgtgcaatcccggctccttccatctccacgcacagtggatggaagttctccacgatcttttcttttgcctccctggatgagatgaactggtcgccgcttgccacctttccggtaaatgtgcggatgtccgggttcgccttctcattagccttggctgccttgcgcacaagttcttcatctgctggaaacgccagcgtatccatcctcggtatctgcccgatggcatccccgaatatagtagcgtccatatcatggtgaagggcatccgtggagataaccatatcgccaatatcaattctcgcatccagagatcctgcgattccggtattgatcagcatatctgcctggaacctgtccacaagtatctgggcacagatgccagcattgactttgccgattccgcttctaactaccaccacgtccttgccgcacagtttccccttgcagaaaaccatagatgcctgctctaccgtctcctgaatatccatatcttccttcaatgccgcaacttcttcttccattgctccgataattcctatcatatcaacctctcctccttatatcacgattactccatgtaggtagtttatcacaactaaatcacgatgccaacttatataacatttagtatctgtgatttaaaatattacatttttctgaaatatcataaaagatatagaaatcctatgatttctttgctataatccgtattgaatatttgttatattaataatctataatgaagagcaaacaagggaggcaatatttatggaatacagaccacatggtgtctgttctcaactaattcgtgtagagttggacggagatatcgttaaaaacgtagaatttgtaggaggctgcaacggcaacaccaaaggtatctgcagcctgatcagaggaatgaacgtacacgatgttatttcccggctggagggcatcacatgcggctataagtctacatcctgcccggatcagctggcatatgcattaaagaaagcaatcggccaatagacatcgctgccaggaaatctgcgactaccaatttcctgtagaaaaaggatacgaggcctagcatataacctcgcatccttttctgtcctttttgtcttatacgtttttctcttgattccggagagattgtgggaagcaccgtctacgacgactttaacccgtctcgtgggtctacggtttctcaatgtaaggtcgaaattattgttaatagtttctcctgttgcaccgcagacggcgcttcccgcaatctccccggatatagcatattggcatttttgttttctaaatttgtttttccgattgcaaaatgttttttgttttcttctttttcttttatactttggttttcacattttatggatcttccacatagacaccgttcgtaaaggaactgctcatatcactgtttgctgcatgtaagcatcttactcgataataatatccgccttcaacttctaaggttcgattagatcccaccctatctgtattctggctttctttttgccaaccatcatatattccccaagcagaatcaccttcttgagctctttcgattgtgacagcaatttggacactatcaacaacatgcgccgcaaatgtcgttccgccagcatatattttccccggccccagtctgacgcatttagaatatccagtaagcaaatcttcacctcgagtaatcttcatatcatatccaatagactcattgtcatgggttaaatatgaaccgtctatcattggtctatcttcagatgcatacagatttttagtagacgatagaaatagtcctacaattataacgattacacatgccgtagatacccatttatttttcatccttcacctccatcctcatatttttcctttaccctcatatatataaacacacaactcgacaaaaactgacgtccttatttaagaaaaaacagattatttatgattaaagtaaattcttcctctgtcattgttcctattaaaaagtattctaaaccattataatcgaactttgctgaataacgctccgtattagatttcggcgttctatatttttttatctccatagtatgtccatttatttgttcttcatagttttcagaaaccacatcttcaacatctattccccatgaagaatttttaaaagatgcattaatacaatatacaactgattcttcacccaaataataaactagttctgccgtctgcattgttggatcaaattccattctcttgaaaaccatatcttctggcccattatatattctagccaactcaaccccaaattcttcactaaccatttgatatgctttttcctcattttcttctacaattgtcaagttattttcactagaatctatttgttccacttctctgtttccaattgctcttctcatcatagacactatcctgccaggtccgcctatactagtcacactaatggccatcactaacacaagcgatgccgccaaggtaatatacagtttgcggcgtttctttttacgcgtaacttcgatttcaacttctttatttttttcttcctctagtaccttgcgccctacttctaatgcaagcctgtcttcctctgatagcttagagtatagttcttctctttccttctccttgatctgctcctccagttttgctctgagtgattctttgaacccttccggcatctggatgctgtcatccttcaggatttcttcttcctcttccttcgctagctgctcaaagtcttcggttatcatgtattcaaactgatccttttttcccttcattacttacccctatatttctatttatccttgattagagaacttctatatacaaaactgtcagcccctgccctaaatctgctgtttctcttgaccaattccgttgtaaacgtataatataattataacaagtgtccttatggcattttttctacctacaaacaaaatcgggaggtcattatgaaacgtatcatcttaacaggcggcggcaccgctggccatgttacgcctaacattgcccttttgccacggctcaaagaattacaatatgatatccattatataggttcctataatggtatcgaaaaagaactgatccagcaattcgggattccttatcatgggatatcctccggaaaattgcggcgctacttcagcgtacagaattttacagatcctttccgtgttatcaaaggacttggagaagcacgcaagttagtcaagatactaaagccagacgtaatcttctccaaaggcggctttgtctctgttccggtggtattggccggaaagagccatcacgtcccaacgattatccatgagtcagacatgacccctggtcttgccaataagatatccttatcttcggcaaccaaggtctgctgcaattttcccgagactttagagcatcttccagaaggaaaagccgtgcttacaggctcccctatccgtcaggaactgttgtccggtgacaagtataaggcaaaggaattcctgggatttaccactgacaagcctgttatcatggttgttggcggaagccttggctctgtcgccgttaacgatgcagtgcgaggcatccttcccgaacttctgaaagacttccaagtcgtacatctatgcggcaagggaaaggttgacgaatcgttgaaaggcttggagggatatgctcaattcgaatatgtcaaagaagaattaaaagacctttttgcattgacagatatagtaatatccagagctggcgccaatgctatctgcgaattgctggctctccataagccaaatcttctgattcctctttccgccaatgcaagccgtggggatcagatactcaatgcccgttccttcgagcgtcagggatacagcattgtgctggaggaagaagaacttaataaagatgtccttcttcagtccatcctgcgtttatatgagaaccgggattcttacataagcgctatgaagaactccccacagcagaattctattgatactattatagatttaatagaagccgtatccaaaaaataatacgtgcttcagcacaatggcaatatataaaacaggtgtcgctcaggcacctgttttatgctttgttcaagtggtcaaactgttcctcgaaatgcttccgaatccatttctttgctctatacaacatactatgaagcgtctccagtttcacacccatgatctctgcaacttccttttgcggcttttccagaacatatgtaattgtgactgcttcataccaactgggattcagatcatacaaggccgaaaatatatcttttacaagttccctacttgcccgttcttttaattttctgataaatacgtcctctgtactgtgatcaaaatcggagggtgccttttcatgcttttcatacagcaggtcatcaatcaaaacttcacgtttccgatctctaatcacattcagcgccatatacttagttgtcaaaactagccacggacgcactgcatcaagatttacatgatccatattcatatacaatttaatgaaaacactttgtgcaatctcttccgctgtgtgatgatttccacaatattttgctgctaccttatacacaagctcgacattgtcctcatagattacatcaaaggccacttttcctatcgactccacactcacttgtttatccttcgcttccttattattttaactttgataagatatcatttttatcttcttctgtcaattcgcccatcttccatcccaggcccacgccgtcgccagtatgtcttggaatcatatgcatatggaagtggaatacggtctgccctgccgactcgccattgttctggacgatattataaccatcacagtccaggatgcctgtaagcttcgtgatcatcttcttggcaagcacaagcgcttttccagccaactcatcatccaattcatacagattagcataatgctcctttggaattatcaaagcgtgaccttttgatgccggacttgcatccagtattaccctgaaatcctcatcttcatataatgtagctgtaggtatttcaccattggcaagtttacagaatatgcagttttcgtccttcatttttatcatccctctctctttaaaatagtgattgattattttacccgccaatgctaaactgttaattcagaaagggcggtaataactatgtttacaacgacagactacgacaaattgcaacaaatcatggcagaaagtccacagaaaaaagaacttcttactcgactcctggagtcccatcgcatggacatcagcaccatcagccacgaaatccgtaacccattgacgctggtatacagcacattgcaattaattgaatcccagcatccggaagtattaacctttcatcattgggaaggaatgcggcaggatattgaatatatgaagcagttattagagcaactctcctcatataataacggcgagcgcttggaatgcgctgcaacagatgcacgaacttttttgagaaagatcgcgctttccttcgcttccacccttgtggattcacagattgaatttacttcaaggattcctgccacacttccatccataagcattgatcctacgaaaatgaagcaagtacttctaaacttgcttaagaatgccaaggacgcggttctttcatgcccggatagggataatgcggccatctctttgacggctgccttccagaaccagcaggtcgtaattactatatctgacaccggctgcggcatcgcgccagaagacttgtccacaatattcgagccattcataacccataagcaaaatggcaccggcttaggccttgccatagccaagcgtatcgcttcggcccatcatggttctcttacggtggaatcagtattggataaagggactgtcttcacgcttacgcttccagtacagcaggatgcatagaaggaatcccgtcgtcaatccgccgatatgtgccatattgtcaactcctccgctggagtatccataataaagcgtaataaaaatcataaagacaatgcctctgcctgatatatcgccgatccgacctctgttgcggattgctacatataataaagccccgataattccaaaaattgctcccgaggctccggcagctatggcatagtccgccaagcggatgtcccaccatgaggacaggatatttccacccagaccgcttaaaatatatataaccaaaaacctgatgctgccaatctcgacttccaggttccagccgatcaataccagcgtaatcatattgttaaaaagatgctcgaagccaaaatgaagaaacatgctggtaaacatccggtagtattctccctgttcggtaataaagggtacgtacattgccccatgttccagcataaaaagcccgtcttccgtcgcgccttgaaatgacagcaaaaagaacactgccacattggcagccagtaataaaattgtacatggagccttcatcttcttgctattcatatatcacttaaccgctttctgacatctcttctgattttattctctatcagtatagcataagattgaaaaatagtaacctccaaatctattctttgttgattattcacagattttctttctctatctcatcaataagcccctggatcatgcccagttcctcttccagtatatccgcaatctcctctgccgaacagcccttttttaattttttcctaattaaatttttaatggcttcctgtttcccctcctgttttcctatttctcttccttcctgcctgccttcttccagtccctcctgccttgcctcttctttgtcgtagtatctttcttcccatgcctgcatatatttcacccctacttcttcactggcttttaccttacgcacacggttatggatacgcttaatccgttcgctgtccatatctgcagccatttcatccgtagtgtcttccacataacgcaggaatcccactagttctttggatacctcgccatcattctttccccgggtattcagaaatatgcgaaccgctccatcttcaaggcagcaatcgggctcttccaggcatccagcacgaaacgtgtacacatatctgccatacccaaacaggtcgaatggcgtgattataataatatacgaattatttaactggttataatccggaatccccggttccagaaggcctgcgtctatcatagactggtaatatctgctgcgctttgccaagtccgtccttttcttctgctgcatttctgtgttgtaaactgatttttcttcatccatggcgtatacatccatccgaactgcacgcagatgcggcgataccctcaactctttctccgtctcattttgttccagcaaaggaatatcccttccaaagataatactgagaatatcctgatgtgtctgcggatcttccagcacttcatcaaacagaaagcggttcgtaaggtttaactcttttaatggtatcaaatcttttgttttccccatatgtttctcctttattttaccacaatctcgttcctcttaacaatccatttttcagattgtatttatagttcttcttcctcgatatgcagcccatcccagtcgccccacttaggctttttgtgcttattgagaaatcgtttcacaggcgtccacaggttttctgtttctttcataatggaacttcccatctcctgttccgtaatccagtcatgttcctttgtatcatattccatttcttctatctcctctacagtgtctactttttcgtccttttcgggacgtttcaggcattctgccataatcttttccagactatagttttcttccattgtggctttatgaagcagaaagaccaggcggatgcactcctggtcttcataatccccctgtctgacaaaatactctgtcaatgtatggaactcttcccacaggtcctgggctgccagaggataatagcagaaaaagaatctgctctcctcataaaagatgtattccggcttcagcaagatacaatgtatattcagcaaatacgcctccacttctttaataactgtcttgaactgcgtcagaaacagtttaaggtcctctccgctgatcttgcttcgctcatacattgctttcatggaaactttcccactgacatcataatcataataactgctgccattcattcctcttgcgcctaccttaagaatcccatccagcgaatttgccttcagcatccgtatttgatagtcttcttgatataagtcatgttcttcaattgtaatcttacgttccatcttcacttctccttcaacctttgcatatccctaatatgcttctcgggttctgtgactgccgcctttgttaccacggatatcttcatctgcccgtaagaagcaatggcattcacttcaatctcgtcctttctgaccttcacattcgcctgagcattgctggccagaatacactttccttttaccctctggacgaaaaggctttccagctgtcctgcctttaccccgtctttttcccgcgcttttgtgctgcctgccacagccgtctcatatgccgcgccggttaagatgagtttgtcatggtaataaaaagccgccaggatgcatcccataatcagaaaaaggatcattggcataagaaatgacatttctaccgtcaggctgccttttaagcagcccctgctttttacccgttttttcattttcctatatgactcttcccccatttatctcccccttgccagcacgctaagcaaatatcctgccgccagaaagggaatgaatggaatcgtatgttttctagacattttctttgccgtcagacagaccagagcggccacggcgaggaagcaaaatgtccccaccagcacatccagcactccccacagccccagatatattcccaaggccaaaatcgcccaactatctccgtaaccaaaaccttcccgcgtaaccttgctgaccaggagaaacagaattcctacgccagcgcctcctgctgccatccacagatccggctgccttgttatcccctgataggccaatgctgcaatactcgccatgaccaggatatccgccggtatccttcggaaatggatgtcaatcacagaaaggcttagcaatatgcccatgcaaatcatctggcttatttcccacatcttgagcaagccccctttcctgccacctctgacagcggcactgcatagatggttcgctttaggccgctgcaggatagcgaactatggtaacggtcgccggtatctgtgatgtacaccccgcctccggctcctttcatacaatgctggcaaggatgatactttccaccgccttcatttcttaaggattctatctccgactggagcaccatatgtatggatagttccaggtgcgtgcagtggtaatcacgatgatacaccagcccagtctccgttacatagaccgtatcatcgtcatcacgtccaaatccctgcttctcatagcctgtccaagccttgatacgcagtttttcttcatgctttgccggagagattccaaatataggaagtgggacgcgtatctcgtacgatgccaccaattctccgattcccgtacggggcgacattctggacttgtcacagtgaatccctccgctacctcccgatatgatactcctttccaaccgatcctggccgatcgaattcacaacatcgctctctatgcggtaaggcattatgaccgccgtgctgctggcttcatctgccgctctctttccgcctgcctggagcccacaccggacggaggcctggattgccatcgtctccatcagatacagaaggctcacaatcgcaaggaaaaacagcgggactgccatcgctgcctccacagttacgctgcctttcttagaggcagatgcagatgccctcccggtccagacagaatagataggttctaaggggagtattttactattcatggtacgaatccttctcctttcttttatgtttaactttttgttggatgagtgcctaagaatccggaaggacatctgcatccgcctctactgatatccaaaataaattggaaattcataatggattccccttcttaacctgcagactgatcgaaactccaccctgctgatacacaaatccgcacgaaaatatgcctgtccatatacttttctcagattctgctcaatgattccaagcgcccgtaatccagatgtttgtttgggcgccagaaaaagcagcatcctcagataatctttatattcaagaccttccggcgcatcggctccttcttttgtgtcctcttgcgtacccagagtaagcagagaagataactggagctgccaggtttccctggactttaccagcggcacgcggtttccctttaacaaagaccgcagatccataaccgtctctccatatgcccatgccagaagaatcgcctgggcagccgcgctcgtgatggcagggacagtaagaagcatgcacagcgttgcggccatcgcctctgcttctgccttcatctctccatccgtttgaatatacgcataattaggaacgaacctaagcatcattaacttctttgccaccttctccagattctctttgtcactgcctgcgcccgccaggatgtactccaattcataatctaaggctcctccccttccttcatctgtaaaggataagaaattctccagcatatattctccgaaaaggagagatgacacagttcctcccgccttagccacatcggaaaaatctccatatccctcctgtctggctctagcggagagcatttccttttcatcggcctgcttctctgataatgccctgtctttgggcaataccagttccagcagtggctgggccttcaatcgacctacgtggtcaatggggttatcttctttgggcagttcgctgtcattcgaagcgagcagatcttccaagcctttttgggttttggcttcctcccttgcatactccgctcctttatcctgctgctgcccccagacggaagtcatccccagcatatccttgaccgaatctattccatacttgtgctccatatatgcggtaatctgatcaaagaaagattgacagccctggtccgtgaggaactgtatccgctttatctcctgttccatatttcccgcaccataataccctaaacgctccatcaagtttgactgctcatattgccctgtctcataactaccgtccagtgcaaatatatggtactcgtccagcaattctttctgatattctgcaaacatgcactcgactgcccggttcatatctgcccgtctgtaattcttcgccatctgtatcgaggcgctttccatcagtccccctaccaatgttataaagaggatgaagaccaggcttaaatatgctgtcacttctccgcggactagatgcctgaactttcgctggttatcttctggaagattatctgcaccaggctggtaagctgggacttgaatataatgaccagcccaatcagcacgaccagtatcaatataacttctacgactccgattcctctcttttctcttaatacttgcgatatataccatattctccacatacacgttctcctcctaagtttatctctgcttctgacttcacatctgctccttcgtcagcccgttcctttactgacatacactaaatctgcatagataggaacgccggcactatgactatgatcagcacgattgccagcattaggaacatgggaagcagcaatttcgtgcctgcttcttctcccagcctttttgccctggctttgcgttcttcgaaagcctggatggattccagccgtaatagatgagtgaggcctttcgttcccttgcgaagattctgtgacagcagcgcccctaatctgatataagactgcacgttgcatctccttccaaaattctcataactttctgtctccataaccccgctttccatctcgtaacacgcctttttcatctcttcatatgcatgtcgggcatttccatctgtcttatgtcgttcataatcctccactacttttctccacgctctttttacagtcatgcctgcccccaggaacaaagccaacttattgacaatttccggatagtccagcatcatctgccgcttcttttcttctccttccttccggatattctgctgctttaaggcatacagcaggatggctatcaatattgccatcacgatcaagaccagtccccggtagtccatcttcttataataggaggctgcctttccttgtatcttctccggaagcagccatacccttttggtcttgctatctgcctcccgcttcataatttcctgcatgacctgctgccccttttgttctttcccggtcaaggccttcggaaatatatttgccatgcactcatatagtgcctgttccttcggatcttcgctataggtaaggacagcgcttagctttacaagcgtcccctcttgatccagcacgttctcctgcagttctcccctgatattcatcacatcataacgatccagctcccactcaactcctactggctcgcccggcacctgcgtcacaagatccatgtcatattctatcctgtccaggctctcatttttcccgagaatcagcctgtccagtctacgcattaccctctgaaataattcccggacctcttctttgctatattgctgctcagatactttaatctccacaggtatcttttctgccgcgccttccagcaatacctccagcatctccgtgctcgcgccttgcccatggctgttccttacaattttccccactgtcctggtagacgcagacatgtaatccacaatcaataggaggattcccgccagcaggatggctcctaccgccagaatctttatacctcgatccttatgatccttgctccaagataatatgcgcccaaatacattgtcaggcaagccgacatcaccccgattcccattatgttaccatacaggctgtccataaattccgggaaacttaatgacatatagccgataatcgcatacgggattgccgccattacccgaaactcatacttcttcgccgccagcacggtatctatctctcttttcacatcaatcttgtctcctatctggttcgctgtattgcggataatagaaatcatatctcctccgctttttcttgcagctgcaaatactgccacgaagttctccacatcctcctgcccggaccttccggcaaactcctccaggatctgctccataggtacatgaagccttagttgtcttgccatcaccaggaattctcgtgatatccttgcatcctcagggtacagaagccttaattccttctgcgcctcaagaagggcattctctacggaatatcctgtattcagggctgatgccatggcttggatcgcttccttgaactgcagtaggaattcctgatcttttttgcgagccacctcttctgccatcatcttaaaatgccaggcccatacgggaagcagtggcagcaacatccagaatgaacggtagtacagccaggcggtcactaaggtaactgcgcctgacttaattgtgatcatcgcaagttccttcttggtcatatcctgccatcttgagtttctgatcgttcgtaatctcatgtatcttcctccaattccccgtgattttccctgccttctctccttcttcttcatacttatacaatgactgaaggcatatctttccgttctcatatcccagaacctccgacacttcaagcaattttcgactcttatcccgcagtctccccagatggacgatgatatcaatgcccgaggcaatctgcctttgaattgccggcaaaggcagattcatccccatcaataccatcgtctccagcctggcaagcatatctgccgtactgttggcatgtccggtactaagactgccatcgtgtccggtatttagggcctgcagcatatcgatcgcctccgctccccggacctcgcccacaatgatcctgtccgggcgcatcctcagggccgacttgatcaggtcgcggatcgttacggcgccagtcccctccacattgggattccttgcctcaagactgaccagattggggatatcctgcaattttaattctgcgttgtcttcaatggttataattctttcatcctttggaatatactgcgataatgcatttaagaaagtggtttttccggaaccggtccctccacttatgaatatgttatatccggctgccaccagagcggccagaaaatcagatatttctttactgatggaattccatgcaatcagctgatccatggtaatggcctcttttccaaattttcttatcgtaacaattggcccgttcactgccactggctctagcacaacattgacccgggagccatcggccagcctggcgtccacgataggagatgcttcatttaccagacggttagaactcgctacgatctgctgaatgacatcttccagtttttccttcgacaggaaccgcttgtccgacttatggattctgccatcccgttcaaagaagatacttcttgtaccgttaatcatgatctctgtaattccttcatcttccagaaactcttgaagcaggtccagcttacggaatgcattgaataattccttgcccagttccgtcttgcgcgaaagagaaagatactcttctgaagacgcttcctgaagaacccggtagatcagttccgtcagttcctcatcttctatctccctggtcatatccagttcttccagaatcctggcatgcagctgttctgcctgtatcatcgctccagctcctttttcaccagtttcttcttcacatcctcatagccaagcagccttagttcctcttcaaactggaacagtttggccctggcagccggatccctcgccacgggcaccatcacttccgtacattgcctgagaactccatatacatcctgtattccttcgtctatatccagtatcaggacatcatagatggcgcactgctcaatctgcataagaaggctcgtccattcctcgggcgtgactgcctttatgtcttcggatacccggaacgggagcagatagtccagcgattccatatgctttgccagcgtggtaagtatcattccgaagttccggctttcctggcgggaatagtagatcagatctgccagcgtctgcccttcctctggaaaatgaccgccgatccctccatacagttccatattgatatacaggacattataagatacggccagttcctttcccatttccagcccataaccagtctttcccgtgcggtgtaccggcgagaaaatcccgatgatccgcatctgccttttctttgccgcttggagaaataatccttcttcttctccttttaggccacactggcagatgacctccgcaagaatggcctcccccgattgatatcggtataccgggatttctagaggcccagtactcgcacttgccgtctctgtcaggacgaacacgctccccgcctggatctcctttctcatctcctgcgaataaccgctactgataagaaggatatcaatcgccttctcctgctggattttccgtgcttgtcccgggtcgctgcacacctgcacttgcagcgcgagttcctttttctttgtcagatacgccgcgaacgcagaggcatacttctcttcctggtcgcaaataaccagactcttgctgctcacgtaaaatccctcctctgttgctgtcttatcatgtctgtgtgatcttccgccgatacggcatagaatctatcaatagaattagataatcagatacaagtcaccagatgtaacttgtaggacgattataaaccacatatttcctgtttgtccatcccttttttaaaaaaggtagaactttgtgcaacccttacaaaatctggtagaaagtaatgccgtaaagtagcgcgacccctggtattccaaagaccccggacgtcaaaaatgtcatcggattcatgccaacctgcgcagaaatccccttagaagccaaaaactcatttacaaaaaaaataattgcaatgcctatgattgcccgtactaaaaaattaactaaaatatgagatttctgctccggcatattcaccctcccaaattcatttcctaattccatatatatcctcgtatctggtattttattcttcaaatctgcctatactagaaaaaagaaaaccaagcgatacagcaatggaggtggattatgagattatttgagcgaggaagtgctgccgaagaagatatatacaggcgcttatccttcgatccccagtgcaatactttgattgaagagatcgcccaggcaaggcaggaaatcgaagatgcatacaacaacttccagaatgcctcagacccggacttgatcgactgctatatctacaaaggcaatgctgcctggaaacgctaccgtttccttctgcggcaggccaagatgatttcataagcatagttttataagcaagaataaagaaagggaagatcccacctgaccggccgggatcttccctttccttattcttgccaggcttacagcctgatggtaatctctctttgcgtacggtggtactgatggtaattcacgcctgccgcatcaaacatccgcatggatgccttcacagaggacgtatcttcatatttattgcaatcatagatcacttccttaatcccgctttgaatgatcgccttggcgcattcattgcatggaaagagagacacatacagtttcgctccttccaggcttccgccccggtagttaaggatcgcattcaattcgctgtgcaccgtatatacatatttggtctccaacgggtcgtccccttccctcacccatgggaattcatcatcagagcatcccatcggcagtccattatatcccatggacagaatcttgttatcctggcttacgatacagcagccaacctgcgtattcgggtctttggaacgcatgccggataacatggctacacccataaagtattcgtcccaactgatatagtctttcctcttgctgcccatatgcattacctccttaccgcagatatgccattacttggttccaaagatacggtctcccgcatcccccagccccggcacgatgtatttctgctcattcagatgatcatccagagccccaatatacagatccacatccgggtgtgcctttgtcatccgctccacgccttccggcgccgcaatgatgcacatgaaccggatattcttcacgcccttgtccttcagcatctggatcgccgcaacgctggatccgccggtagccagcatgggatccaccacgaagacttctctttcatcacagtcagccggaagcttgcagtaatactccaccggctcaaaagtctcaggatcacggtacaggccaatatgccctacctttgcggcaggtatcatattcagtatgccgtccaccatgccgatccccgctctcaggattggcactaccgccatcttttttccacttaattcctggcccaccgtctcgcagattggagtcttaatctttacatcctgaagcttcagattccttgtagcctcatagcacatcagtgccgcaatctctcccacaactgcccggaaatccctggatcctacgttctcctgacggatatagctgatcttatgcttaatcagcggatgatccatgatctgtacgttagacatcttttcttcctcctcattcgtccttattatttattagtgtttatatatgaatcacgtgatgtccggctgccttcagcaggcggttcataatcgcgctcccaatccctcctgtggcaaatgcctcgctgtagatataatcaacgccgtcattgtcaaattcccgcaggatgccatagaggcttcccgctatagtcgcttcatcctccctggtgcctatgctctttacatctcctgccggatagcatcctaccgtctcctcggttccaatgatccccaccttcagaccttcttccagcttctctgccgccaggctgttgatcttggcaattacctctttgatttcaccctctacaatagtcaattccgctttcggcgcataatgcctgtatttcatgcccggagccttggggatctttttactgtccggcgttatcaatgtcttgtccaccgacacttctccgatcagttctgtcagcatctcccgggtaatggcgccgggacggaggagcattggcggcacaaccgtcatatccagtatggtagactccacgcctatgtccacggagcctccatcaataatcatatcaatcttccctgtcatatcttcttccacatgcagggctgtcgtagggcttggccttcccgatgtattcgcgctgggggcagctatatagccgcctcctgcgtcgatcacttcccgggctatctcgtggcttggcatgcggactgccaccgtatcaagaccgccggtagttccatatgggacaatgccgctcttatcaaagatcatggtaagcggccccggccaatacttgtcggcaataaccttagccgcctccggtatgaaagaggtaatctttgcaaggtcatccatgttggttatatggatgattaaaggattgtcggatggccttcccttggcagcatatattttttgcgctgcgtgctcattcagcgcgtctgcccccagtccatatacggtttctgtcggaaatgccaccaggcctccttctcttagtatgcgtccggcttctcttataatatctgtatttattttgtttttatctattttctctattattgttctcatagattttattatactacactctacttcgacagacaagttcggattccctgagtaattgcttccgccagctgctgctgatactccttcgtgactaatttttccgcctcttcattgttgctcaagaatccgcattctacaattactgtcggaaactccgttctcttaagcatatagtatgtgtcattggcctttgcctgcctggtattatcgctatccacggccagcagcgctttctgcatgattaccgccgccttttctccatcgctggaatgggaatagtagaatacctgggctccatggatcccctcctcatgataactgttctgatgaatgctgactaccattgccggcttcgtcttgttgattacatcgacccgcgccttcatatcctggatcttctgattctggtcactttccttagccagcgtggcatcctccttacgggtcatgactacggtcacgccctctttttccagaagcttcttgaccttcttggcaatctttaagtttatgtctttctccaatgcatcattcactccgattttgcccggatcgctcccgccgtgtcccgcatctatgactacggtagcgcttcctttctttacatccccgctggatacatatttctccaaattcttgctgacggccagcagccctgccagcgccagcaccaggactgcgaactctacttttttacgcaaaaaaatacctcctgacagtctatatattgattaaatatatgactgccggaagtattttatattttatttcactaatttacgtattttaatatcagattccagatgtctggattttcttgtcccaaagcccatgctgccgtacctgcaagtttattctctttcatcagctgcagtttaggctcgatagatttctcatcctccagccatatctcgtatgtcacattatctacggtccatgtggcatagttctgctgcgccttatcatcccaggtaatctctgccccggcctgggccacctgatcgcttgcgctggtcattcccaaggcctggctgtccacattcatggtatattccgcggcatccgttcctgcctggcttgccagttcttcctccgtcttcggagtctccgaccatagcctggtgaagaacgggattccactgatcaccttttcagccggaacttccttgagcgtctcttcgatgccttcttttacaaaattataagaagaaaccgggcctgcctccggcgagcctgcaaaatgctcatcatagcccatgataattacgtaatctgcaacgattccctgctccttacggtcatattgcatattatagcccttaggaacataattgtcgacagacagcacgattccattctgccggcatcttacagacaattcgcggatgaactgtatataatgctctccgcattcttctgaaatcttttcaaaatcaacgttgattccatcgattcccacgcgcaatgcttcggaaatcagttggttgatcaaattctccctcttagaggtataacttagcaatgcataggattcatcataggagttgatgcccccgtcaaaatccctgatagtcgcccacacttctatgttggcctgatgtgcataatttacataatccgcggaagctatggagtccatattcccatccgtatcttttacatggaaccaggttggcgcaattgtcgtcagacccttactctctgcaatcttctgcagcacgcttccatttgcgtcactgttggtcacgttgtgccatgccatgttgatcgtataatccttggaaatactggtaaattcctgctcttcgaaatctctggatatcgtcttggtctcttcattcttcaggtctttgttcctgacgtatccgataaatccgtccttcgtgcggaccttcttccagttctcctcgctctctacgatcgtaacttcgtcctttttcgatacttcggtaaggatcggactcttgactccgccctgatagcgaacctgagtgtctctttttattgttgccactgtagtctttccccagtcgctgacgatcatgactctgctcggattatcgtaaacctcatactccatattggtatactggctgataaaatcaagtgcgatatatgccgtgcttccttcggtctttaggatgacgtagtcttcgcttttcttatccttcgacaccatatagtccttgctgcctacttctacagaaaccatgtcttttggaagcgtgtacaagaggatattctcatctggatcccaatagaatctgctgttgatgtattttcttacgacatcatactggatatatgccttgccatccacaatcatgccatggggttctacgacctgattattaacggtaatagccaactgtccttcctgttcaatcccataatactttttcaaatcatacttttcttttgaaggactgtatcgtttccataaaaatgctgccacaacagctaatatcgctaatatgatcacaaggaatatcttgattcccaagtttctctttcttctcctcttggattggggccctctcgccggcgtccgcttgcttcccggtctcccggactgcgatcttctcgcctgctgccttctggcctcctgctgccttcctgcctcctgctgtcttctggcttcctgctgccttagcgcatcctgctgccttctggcattctgctgctttgtcgtatcctgtctgcctgtcgcggttcggcttcttgctgtgccaattcttggcgtccccggccggcttgtgcttcttgttcggtccggaactgtgcggcttcttctttctctttcttccatgctgcacctcctactagaccttattatagcaaaagcattgacacacgtcattatttatttcgacattttattgatttttcggggtatttgcgtttcttcgtttttctggttttcttcagttcttacgccttggaagtccaattcgataatatcgccctcatcatccagtatatagtccctcatataagtcacaccctcccgcatctcgtgagccaggactatctgcatggggcttgcgggtattccctccatcttcaggtctatctttttcttctcatagcctgtcaattcctggaacatccttcttaaatcttcttccttccccatgtactagcctccttttcaatgccatatgataactacggctgcgattgcatataataatataaaaggagatactcgtgatacatttccgccatatatgccgcagctggtaaatatagaagatagttttggcattatagtacttttccataagttcctctaaaaaataatgtgataattatgcctgaaacggcaatctctgatttgtctatgatagattcgcggatcgtcttacattgagaaattaagataaaaataaaattaagaaattctccctcctttgttctaagaacgtagctatcagggaaaactatcttctagtatcgtcattatatccgatagattcagcgaaatcaagcacttttttattttatacttattttattgaacatcccatattttctatgctatactaaattagaaggaagtgatgaatatgaagattgagaaactcaacgacaatcagatacgctgcactttgacacgtgccgatctggctgcacgccagcttcagttgagcgaactggcctacggaaccgaaaaagcgaagtcacttttccacgatatgatgcaacaggcagcctttgaatttggattcgaagcagaagatattcctcttatgatagaagcaatacctgcttccgctgattcaatcgtgctgataattactaaagtcgaggatccagaggaactcgatacccgtttttcaaaattcgctccgtcaccggatggcgactgggatactaagaaaaaggacgcccccgctaaactggaaggcgctgagacattactggatctgttaggcaaggtcaaagaaaaacttggcacggccgaggcggcggaaactgccaatgaagagcagtcatccaaagcacctaaggctaccttgcggctgttctcatttgcaacaatggatcatgtgttaaaggccgcgcgtctgcttagcacgatgtactctggttccaataccttgtacaaagatcaaggcgaagacgtgtatatccttgcgctgacacagtcagacctcaccactaatgatttcaaccggatatgcaacatgctttcagaatatggatctttggaaaaggcttccggcgctacactggcatttctggaagagcactgcgaggttctcgtatctgccaacgcagttcaaaagcttgcggcagtttaacctgcggattacaataaccgcgcttatatgtcaaataacaagaaaagatgcacgggcttgtcccgatgcatctttttgttatttgctgtcatattatgcattcaaaaatgcattgatcttttcgaccaataattcagcatctataccatgaaccattgcagcctctgccaaagactctccctgtgaagccgggcatcctaggcaatgcatcccaatttcctgaaggattggtgcaatccccgggttcatgctgagtgcctcgccaatagtcgtatctcttgaaacctgtgccatcataactcctccttttctcttcaatgtttccattatagctggtttttatcattgtgtaaacattttctgcaaatttattcttaatatttgacttcttaaaagtcaataactattttggtttttttcgacaaaatctaatttttattataacttcacaaaacatccgttcttttatttgccttgaataatcccccgtttttgatgctttttatgtggataatgtggataaaatttctaaaacatcattttttccaccttttttggctatttcaatgtggaaaacttggataagtcgtttttccagtattttacatttttttacaattttgtacaatttgtacattcacctgacaaagtttttaatcatggaaaagtcccgggatttttcctgggacttttcttctcataattcgtgtatattctaaattagtcttcttactgtaataatgcttgtataagtggcaggcaagattccaatacctctggaactgttgatcgcatttacaatctggccgtctcccatgtatattcccacatggccatcatacaggatgatgtctccggcaattgcctgatcataacttacaggcgtccctacattctccatatcccacgttgtacgtggaagactgattccaaaatgggcgaacacggactgtacgaatccggagcagtctgccccatttgtaaggcttgtacctccccaaacataggggtttccaataaactgacaggcatagtccacaatggcttgtcccgtaccggcctttgcactcgcttcttcttcggcctttgcggctgcctcgcttgcttccttctcaagccttgctgcttcttcttctttggattcagcataagtaaatgcttcatcaggactttcggttcctgaattctgtaccatctcctgtgccttttgctctgcgttctttcctattaatatatagtcggaatacacatagcctgttaccgagcctgactggacctgcgtccattcgcctaccggcccgataatcttagcggcataatcaggatacagcttgcctacccactcactgtccgtcgtcggctcgcttcttatatatagaaacgattggacattggcgaacgccatatctaaatactcacccttctgcgttggtaccagataatcttctacttcaatctgtttatcggataagtagcagtcacttagtacctcctcgattcccacctgcggcattatattgtcagttactgtatctgaagcctttaccgtggcaggaaatgctgtcatagctcctgtaaaagtaactaggaacaatcctttcctaagaatagaatccataaactccctcctttatgttttcttatctttagtaaatgttacagaattgttacatatgttacgttgatattatatcatgtgtgtcatcaatgtcaaccctatttatcaataatattctcgccatattatacgtttttatgcgaaaataatactcttttttcacatctaattattacaaattgttacatcttggaattaatcgttgacagttgctctattctgctctataataatgacagtaattattatcattattgaaaggagggcgcagatggcaaacttaaaatacagcaggcaacgagcttctattaaagaatatctggccaataccacctcgcatccaactgctgataccgtatatctccatgtcagggaagagttcccgcgaattagtctcggtacagtataccgcaatttaaacttattggcagatatgggggaggccattaagatctccactcctaacggcggcgacagatttgacggcagaactgagcctcactatcacgttgtgtgcacatcctgcggcaatgtatttgacctggagctggatgaacagcacatccagggcatcaacgcacttgccaatgagcatttccagggaaccatagattcccacacgactctgttttatggaacttgtaaaaagtgtctggaaaaaaagtaaataaaatcataaaataaggattgacaattagaatcaactgtgataaattaatatcagtaacaattactaatattaaaaattaaatttaaataagaaaaggagagttttattatgaaaaaatttgtatgtacagtatgtggttatgttcacgagggagacgcagcaccagctgaatgtccgatatgccatgtaggcgctgataagttcaaggagcagacaggcgagagggaatgggctgcagagcatgttgtaggcgttgctcagggcgcaagcgaagatattatggctgatttaagagctaacttcgaaggagagtgctcagaagtaggaatgtatcttgcaatggcaagagttgctcacagagaaggatatccggagatcggcttatactgggagaaagctgcttacgaagaggcagagcatgcatctaagtttgcggaactgctcggcgaatgtgtaacagacagcaccaagaagaatctcgagatgagaatcgatgctgagaatggcgcaacagctggcaagtttgatctggctaagcgcgcaaaggccgctaacctggacgctatccacgatacagtgcatgagatggcaagagacgaggctcgtcatggcaaagcattcgaaggactgttaaagagatattttggctaagatttaaaaaatcatttccaaaatcatacaaatagagatataatgatatcagatatattttaacagcagggtgcggcacttaaaggctgcacccttaaatttcacaaaggaggattttaatatgtcaaaatacgcaggaaccaagaccgagaagaacctgatggaagcatttgcaggcgaatcacaggcaagaaacaagtatacttattacgcatccgcagcaaaaaaagctggatatgtacagatggctaatatttttgaagagaccgcaggtcaggaaaaagaacacgctaagatgtggttcaaggaattccacggaatcggcgatgtagaagccaacctggaagatgccgctgccggcgagaattttgagtggacggatatgtacaagcgcatggcagaagaggcaagagaagagggatttgaagaacttgccaagaagtttgaaggcgttgcagaggtagaggccgctcacgagagacgctaccgcaagctgctggaaagctataaggcaggcgcaacctttaagggagaggctcctcttggctggaagtgcggaaactgcggatatatctttattggcgaggaagccccggaagaatgtccggtatgcgctcatcctagagcatattttgaaagaaaagttgaaaattattaaaactggataacgaacaaaagcccgttaaatgcagctataagcgaatgcatttaacgggcttttgtattgattctggatctatttcccagcgctctttgttagaatcatcccgcttcttagcagaatcggacgtagtgcattgtacaggcatgctaccagaaccgtagagatcacggcattcacaaaagtagctgctgtactccactttgccagcacttccgccattttccgaggttgacccagtatatacatcttatagaaatatcctacgatcggatcagccaccacgttaaatcccaatcctgctacagaggcaatcatactccacttaaaaacatatttcttatcgctgctatcattaatacgcgcgattctgtgcgccaccagtcctacaatcaggccaatgcacatctttaatataaatgtctttggcgcccctgttatatagatcgggtccatgagatccgcaacgcccatgccgatggcgcccgcaagccctccataagcaccgcctaaaagcaatgccgccagcacgcagaatgcgtttcctatatgaatggatgtggcatctcctccgggcatagggatcttgatctgcagaaatgtaaatgaaacgtagcaaagcgctgccaaaatcgctgtctgtgcaagttttattaccgtctgattcttctgttccataatgacgacttcctttctcttatgactgcacctatactatcaccaaagtggtcatgtagaaatgtccagttatttaatttttaatcagtccagttgtttccatattataagttttaatataatgcttgatttttaggaatcaagggtataatatacatatatagataatgtggttttaaaaactacatgttgtattttttattctcatcatctaggaggcagtattatggcacagattattaaaaaacacatcaaagaccctggaagcgcaatcacacatttcatcggaatgctgatggcaatatttgcggcagtcccattactgataaaggcggctcatgagcccagcaggatatacatcatatccattacggtgtatgcgataagcctgatattattatatgcagccagcacgacttaccatacaattgacagatccgagcgggtcaacacaatccttaagaagattgatcatatgatgatcagcgtgctgatcgccggcagctatactcctatatgccttctggttctcaagggcaggacgggaattatcctgcttagcattgtatggggaattgcagtgattgagatgctgatcaaggcattctgggtattctgtccaaaatgggtttcttccgtactatatatcgggatgggctggacctgcgtgcttgcattcacccagatactcaacgccttatcgcccgcagcctttggatggcttctggctggcggaatcatctacactgtaggcggtattatctacgcattaaaacttccattcttcaataccaagcacaagaactttggaagccatgagattttccacctgttcgtaatgggcggaagcgcatgccacttcatcttaatgtatgcatttatactgtagatttaaaggggacgaatcgagcctttaatgccctacttcgtccccttttctgcacggccatttcttaataattcttcttttgccctgcgggtcatatgcttgatggcatattcccgtttcatcgcttcttccttcgtctcgtatttctcatagtagatgagctcaaccggacgcctggatttggtatatttggcgccttttccgtcattatgcgccttaagcctcttgtctatatcattcgtccatcctgtgtacaggctgttatctctgcatttaagtatatatgtatagttcatatatccgtctccctttaggcccatttacacctttattatagaaagatgtcccgcagatgtcaaataaggacgcgacacatctaatgtcacgccccatctgctattcttccatatattctattgggttcaccggctgtccgtctttacgcatctcgaaatatacgttgcagccctccacgctgtagtatttggtcggctggcttacatagcccagaactgtcttggcttctacatagtcgccgactttcactggtacttcctttaactgtccatagaacaactcatatccattaccaatatcaatattaacggttgtccccgtctctgcggttacatcgatggatttaacgattccggttgttgctgagattacctgatccccctccgcaccggagatgattaccgccgggttgtacttgtactggtccagtgttgagaaatatacggtcttgtccatactgtagttcaaaagtatggtgccgttcaccggccataataacttgctgtcttcattaaagcttacggatgtgccgccaccggctgtcgcttgtgttcctgcgctgccgttttctgtctcatttgtgccggttccttcatccgccgtattctcctgcgtatctgtatctgcctgattgctgattaccaggttgttggcctcttctgaaggctcctttgtttttttctcttttgtgtcattggtttcttccgcccgtgcaagttcttcttttcgctgcgtctctttgtaatcattgaatgtatatgttccaactattgcaattgctgccacaaagcacaatactgccgcgacggtagcacctctcttttttcgtgaaggtctttgcctcttattcatcttatcaccacctctgactatatttttgccagatagtaatggacttattctgtgtccagcaatatttctgctacttctttgatttccgtccccgcgaagaaaaattgcaatatttctttataagtctttcctttttttgacattttattggctgtatgctggctcattcccagtccgtgtccgattcctcgcgtagttatcctcatttttccgttataccgctgcagggtgaaacagctggatgcaagattataagtattgcggaattcctctccactcacattctcctgccccacccgtacatttataacgtatccggcggtatccagcgctgttatctccgcgtccatatcatccaccgtcaccgtctgtatctgtttcgtattctcgatatcaagcgggcagtccacaatcttaagatacgcataatccccatttccaaggacttcggctccatccctggtgcatccattgcttaggcggaaaaagggtgtcaatgccaggtcttccccatagagcagcacctgcccctccgtctcgctccaggcgtccttcagcttgcggtagtatttggaatatttcgctccccacgcgtcctccatctgcttctgcgtccagaactccccttccagtaccgtattgctccctgactctttgatcttcttataaacgtccgtacgcaccaggactgactgggccttcagcgcttccttatcataggatgcaggaatctctttggccaggatgccgatgcagtattcttctattggcatcttaacctcttttttcccggactttacctttatataagtactgtccacatgcgaataagtagtaatgcttggcccatttaaaaacacggtgaccacatatggcaacagtacgatgatgatgatatagcatcctagtttctttaaattctgccgcataaaaaataccctcccatacactgtatggaagggtgtccttttttattcctcgcgattacggataatgaaaaagtagatggaagtgtacagcggcacgaagactcctgcaactgcatgcaccaatgcatagttcttgtctgtatatctttcgaagatctgatgattgaccaggaccagaagcgtcttgaccaaggcgcccaccagcacggaaattatcccgataagcgcaatccccgccatcagcattcctattcccgtgccggaaaacatgttggctaatgctgatcccggatcatgatagccaatggaactatagttcacgcccagcctggccatgcttatggcaacgcctccaaagatcagccctccaaagattcctgttacaaagttgctgacgatcggaattaccagtatccagatgcccggattacggatctccttctctttaaaatgcaaagtgccgcataattctccctggaaataggttcttgcgtacggtatgaacgcaagccatggataattcattccacgtcgttttccaagggtatacatcccaattccacgcagcaggtaactggcaatgcagccgatcgccaatattcccagaataactaaatacgataataaaattgtcactgccatatctcctgcaaaacgctccatttttatacctccactgtaatcttatccagatgccagatatcctcaacatattcctgaatggttcggtcagaagagaatttgccacagcatgcagtattcaaaagagccatttttgcccatctgtctttatcccggtatgcttcctctacctcctgctgcgcctgtgcatatgccctgaagtccttaagtataaagtacatatctgcccggctgctgctcttcgtattcaacagagaattataaaggtcgcggtataactccgtgttgccatgagcataagttccgtcaaccagctgatctacgacacggcggatatccggatcattgttgtagatatccatcggattatagccgccgtttagttcaaagtgaatcacttcatccgaacttaggccaaagataaacgcattgtctattcctacttcctcaacaatctctacattggctccatccatcgttccaatggtaggagcgccgttgagcatgaacttcatgttgcctgtaccggatgcttccttagaagcagtggatatctgttcgcttacatctgctgcagcaaagatccactccgcgttggatacacggtaatcttcaatgaataccatcttaagtttcccattgatgctgcggtcattattcactacatccgcaacagagttgatcagtttgataatctgttttgcgcggatatatcctgcggatgcctttgccccgaagataaacgttctaggatagaagctcttctcgggatgctcctttacctgattatacagatacatcacatgcaggatgttcagcagctggcgcttatactcatgaagtctttttacctgtacatcaaagatggatctcgggtccacttctattccattgtgctccagtatgtattctgccaggcgttccttgttcttatacttgatgctcatgaattccttgagagcctcttcgtcatctgcccatcttttcaggcctgacattaaggacagatcggtaatccagtccttggtgccaagcttgtcggttacccagtccgccagcagagagtttccatgcataaggaaacgtctctgggtaatgccattggtcttattgttgaacttctccggcatcatctggtagaaatccttcagttcctggttctttaatatctccgtgtgcaggcgtgcaacgccgttgaccgaatatcctgcgacgatggcaagatgtgccatcttaacctggccgtccataaggatagccatgcgttttaccttgccttcgtctcccggataagtctttcgaatctgctctacaaaccggcggtcaatctcctggataatctgataaatacgcggaagcagccttgagaacagatcgattggccatttttcaagcgcttctgccatgatggtgtggttggtatatgcgcaggtctttgtggtaatattccacgcctcattccatccaagcccttcctcgtccagaagaatacgcatcagttctgctacagccaccgttggatgggtatcattcatctggaaggtgactttttcataaagttttgtaatatcatcatgcttcttcttatatttcacaattgctgcctgaatgctggcagatatgaagaaatactgctgcttcagtcttaactctttacctgcgtaatgattgtcgttcggatacaggacctccacaatattcttagcaagattctgctgctctaccgccttgtgatagtcgcctctgtcaaaagaatccagctggaagtccacgatcggctccgcatcccagatgcgcagggtatttaccacgtggttattgtatcccacgatcggatagtcgtacggtatagccagtacagactcataattctcctgaacgaaatgagtcctgccctcttcgtcatactctacccggatatttccgccaaagcgcacttcctttgcgtattcgggcctgcgaagttcaaagggattgccatccttgagccagttatccggcttctccacctgatatccatcttcaatcttctgcttaaacattccgtaatgataacgtatgccacagccgtatgccgcatatccaagggttgccagcgaatccaggaagcaggctgccagacggccaaggccgccgtttccaagagccggatccggctcctcgtcctcgatggcatttaggtctattcccatctcgtccaatgcttcctttacttccgtgtacgccgtcatgttaatcaggttattgccaagcgctcttcccatcaggaactccatggacatatagtagaccatcttcggatcatcttcatcatacttcttctgggttgcaagccagtcatctataatgacctctttcaccgcataagataccgcctggaacaactgctgaggagtggcctcatcaaccgtcctgcgaaacagtgtctttacattattcgtaacttcttttttaaatgcttccttttcaaatctcggattatacatattcatttcccttctctttctaagcctgagcattcttatttcttctctactccaagggttacgttctcgccattgatcttccaatcctttacatatccctgcggcgtctctttcgttaccttgagcgcgagcgtctcatccccaatcgtagcggcattttctgcaaatatcttctcggctttctctgttccttcgtaagagatctcgatcttatccatgacctcaaatcctgcctccttacgcatggtctggaccttgctgataatctcgcggacgaatccttcttccagaagttcatctgacaggtttgtatccagaacaacggtaatgccattgtcattctctgatacatagccctccatctgggccgtctcgatcagcaaatcttctctgaacagtgtgacttcctgcccattaatatccagtttcagggcatccgcagcattcaattcatccatggcagcgttgccgtcgatcgaacttaaggctgctttaatgcctcctaacattttaccatattttggccccactgtctttaactgtggcttgaaagaataagaggtaaaatcgcgtacttcttgtgtaaatgtcatagtctttacattcagctcgtcttctacgatctcctggtagaatgccggaagatcaaaatcggcctttacatacatctgcccgatcggctgacggtttttaatgttcgccgtattcctgcatgcgcggcccatcacgaccagtttcagcacacgttccatattggactccagatctttatcaatataggagttgtctgcggccgggaagtcgcacaggtggatactttccggcgcgctctggtcgatgcttcttaccagattctgataaatgtcttctgtcataaacgggatcatcggcgcagctgccttgcatacttctaccaacgcggtataaagcgtcatgtaggcatttatcttatcctgctccattccctttgcccagaagcgttcgcggcttcttcttacataccagttgctcatatcatccacgaagtcctgcaatgctcttgctgcctccggaatcctgtaatttccaagattgtcatctacttctttaattaatgtattcagtttggacagcagccatttgtccattaccgataatttatcataatcaagcgaatattttgtggcgtcgaatccatcaatattggcatacagcacaaagaatgcatacgtattccataaagttcccatgaacttacgctgtccttccgtaactgcttttccgtggaaacggtttggcagccaaggtgcgctgttgacatagaaataccagcggatcgcgtctgctccgtatttttccagcgcatcgaaaggatctacggcgtttcctttggatttgctcatcttctgcccgttctcatcctgtacgtggccgaggacgatcacgttcttgtacggcgctttattaaatatcaatgtagagattgccagcagggagtagaaccatccacgggtctggtccacagcctcagatataaagtcagccgggaactgcttctcgaacagttccttattttcaaatgggtagtggtgctgtgcaaatggcatggatccagagtcaaaccagcagtcgatcacctccggaacacgattcatctctttgccgcagatcggacacttaatggtaaccgcatcaatgtatgggcggtgaagctcgatatcttccgggcagttatcagacatttccttcaattccgcaatgcttccgatggaatgctggtgaccgcactcgcactcccagatattcagcggagttccccaataacggttccggctgatgccccaatcctggacattttcaagccagtccccaaaacgcttctttccaatactctccgggatccagttgattgtattgttgtttgcgatcaggtcatcctttacctccgtcatcttgatgaaccaagattccctcgcatagtaaagcagaggcgtatcacatctccagcagtgtggataactatgctcgaacttaggtgcgtcaaatagaaggcctcttgcatccaggtcctttagaatctctggatcagcatcctttacgaatactcctgcacatggagcatcctctgtcatgcgccctttctcgtctaccagctgaacgaaaggcatgtcatacttgcgtcctaccttggcatcgtcctcaccgaatgcaggcgcgatatggacaacgcctgtaccgtccgtcaacgttacataggagtcacaggtaataaagaaggctttcttattctgccttgcagcgcagtctgccgcgcactggtacagaggatcatattctttgtattccaggtcctgtcccttatatgtctcaagaatctcgtaagctggatttccttcttctgccagtttgccaaggaccgtatcaagaagagcgactgccatgtagtatacgtatccatctgctgccttcacctttgcatagtcttcctgcggatttacgcaaaggccgatattggatggcaatgtccaaggcgtggtagtccatgcaaggaaatacgcgtcttcgcctaccaccttgaaacgaacgatcgcagagcgttccttcacgtctttatagccctgggctacttcctgtgcggaaagcggggttccgcagcgcgggcagtaaggcacgatcttaaagcccttgtaaagcaggcccttatcccagatctgtttaagcgcccaccactcggactcaataaagtcattatgataggtaacatatgggttttccatatcagcccagaaccctaccgttccggagaaatcttcccacatacccttgtatttccatacgctttccttacatttgtcgatgaatggctccaggccatattcttcaatctgatcttttccatccaggcccagcgctttttctacttccagttctaccggcagcccatgggtatcccatcctgccttgcgcggcacctcatatcccttcatcgtgcggtatcttggaatcatatccttgataacgcgagtgagcacatggccgatatgcggcttgccgttggctgtgggcgggccgtcatagaacatatagatatcattgccatcacgctctttcatgctcttttcaaagatgccattttcttcccagaatttttcaatttctttttctctgtctacaaaattcaagtccgttgaaactttcttgtacattttgaaacctccttaatcatgtatcttaattaaaaataaaaaaacttccgccctgaataggacgaaagccaagcctgcgtttataaaccacctaaacatactatcatatgccttccctgtaacgggggaatgccgtcagcatctacttggccgtcctctggcctttcgaacgctgcaactcggaagtgatattcagatataccttacttgtaccaggcttgcaccgtccctggctcgctatgcctttctgatctatcctactgtcttcgtcaacatctttcatatatgctgttctattatagtaaaaaagcccctgaatagtcaagggttttttacaatctttctatcttctgcgccgccttttccttatgcggctcctgcgcatgatcacgctgatgaatatagtgatcagaattgccagcaccaccgatgcgcatgcaacagccatcttctttgtcttgcctttcttttggccatcatcctttggcttcttttccttcttcgcagccgtaactttggccgaatgctcatccttataactgtcgctcaaggtacatctggcagagccaacaggattgccttcatatgtatattgaagtgttgcctcgctgctgattcctccgtccggtaccaattccatatccagatcttcaaacttcacgctctgcggaagcattacgtaattgcagcttccatcctccaatatctctcctacatccttggatgactcataatctgccaccggcactttcccaaaattgttaaatgcgtactcgaacaggcctgccgtgtccgggtagatatgcaccccatgggtccttaagactacacataccagctgcatgccgccattatctgccatggttatcaacgtagacaatgcatccgatgtaaaccccgtcttccctccgatcgcatatggataataattcgaattctccggtatcagcatcttatgcttctgctgaaagatatgttcttctaccgtctcagatgcaggaattgcatagttcagcgtctggacgatgcggaagaaatccggatgcttgaaaagttcccgtcctataagcgccatgtccctggcacaagtatagtgattctcatcgtgaagcccgttcgtattggcaaaattagaattctcccctccaagttccctgcaccggatattcatctgttccataaaccagttgtaatcatggcctgcattgatgcctacgctctcgcctaccgcataggccgcctcattggcggatgccagaagcgttgcgtgcagcgcttgctccagggatatctggtttccctccttcaggcctacggaagaatctcccggcttaaggaatgccacgctgtcatgggaaaatgtcaccggatcttcaagctgcccgttttccatcgctaccagggcggtcaacaccttggtaatgctggccggatattggtgggaatcgatattcttcgcatacaggattgcccctgtccccacttccattacgattgccgcctccccgtaggttcccggcccttgcggccaattcttccagtcattgctatcaaccttcatctcataggctgcttgttcagccttctgttcttctgacagttcctctgtctgttcggccgcatctggctcagtggcaaatgcggtcgtttccctgcaagcgcacatgactgccagtagtattattgctgccagtatctgcctgcctcgtctcatcatcccgtcctccgtataactttttcttgcattacattttaccatagcaggagtcattgcaccagtaaaacaaattacagtcttcccagataccagatgatccttccttttatatcattgttcttcaccgcgccaaattcccgtgagtcttctgatatttcccggttatctcccaggacgaagacttccttatcttcaaccaccaccggatactcgatgcagttcccagtcctgctggtcttcccaagcgttcctttgaattttgcttcttctccattcacatataccttgcccgactggatatttaccgtatctccggctactgctacgactctctttacgaattcctctccgtccgatcttttaaacacgataacatcccctggcttatactcctttcccagacgggaataagctacaatatccttgtcatggagggtgggatacatagaattgcctgtcacggtggaaaatcccatcatcagatagaaaaccagcaggatcacggcagccagcgctaaaaactgcagggaaatcacgagcctggcccttctcatttcctttttcttctgactgcgcagctgcgggtctacatcttccagcacctttttcttaatctcatctatctccataatatgaccttctgttctgcaaatttattatcttactattataatagattgaccaactgaatacaagttatgatataatggcttataatattagcaactatcaaaggagtctgattgtcatgaagaagttaagcgtgtttaagatcatccagctatccatcctggctgtgatcacccttatcagcgtctttttcctattaaagccagaggtaaagcagttcgtgttttcctcttcttctgctaccacattattctttttaatttggattattttaatagcaagttttttgtttattatgatagatttaagtattatatcttccattaaacttcattttcataatttgtatggggtggcatattcagatcctttatccggcatacccaaccgcttcagctgcgatacgctgattgaaaagtatattgattccgaattgcccgaggatatcggatgcattatgattgaactggccaatctgcctgaggtcaattcgctgtatgaccacgctgccggcaaccgtctgttaaaagatttttccgccatcctgtcttcatccgcgctgtcgcttggctttgtagggcgaaacggaggaaataaatttcttgctatatttgaagattgtacccaggaaaaattggatgcatttcttacgagagtttttgaaaaagtacagcgccataatgcaaatgcagattccatagacatggaatacaaagtcggggccgcccttaacagcgaggagcatcttgcgaagattaccgggcttatcgctcttgccaataaccggatttacaaataatcataatataggagggagttttgttttatggctgaactggattatgaatatttggacagactgttaaagaaggcaaaagagaacgatagcgacgcccttgccgaattgtacacagccacctacaggaagcagtaccgttacgcatgccaatatatcaaagatccttttctggcgcaggctatcttgaaggatgtctatacatgcgcctttgagaatatagaatcgctcgatgactcgcgccgccttgcatcctggctggaagagatcaattatcgaatctgccatgaagcatccatgcaggatcatgttccctcgcactttttccgagccaagattccagatctggagccgcaggctgcaggagaattgcttaatcatatttttgccaggcgtgatatggaacccgccacaatccctgtggagattctagaatcttgggagaattataaaaagcctggatttatatgggagaaggctgctgcctgtatattcctgcttcttcttctgcttttgccctgcctgtttcttaagccttccattgtggcagaacgcacgaatgtaaactcggcatctaatgcactgtatgtgatccgcatccaaagtttgcttccggtgcgctccgtcaacgcaacgcttgataacagcacaccggttcatctacgcaaatccggttccaaagagtatacagccgagatcatttccaatgggaagttaaagatcaaggcagtatctatgaacgggcagacagcagtcaagacttataccgtatcgcatctggatatggataagcctgtatttattaaatcttataccaaagacgacctgatatatctggtggtccaggatacctattccggtatagattacggaaatatccgcggccttaagccagtatcctatgacatagaagaaggaatcattaccttccggataccaaaaacgcctacatctgtaatcattccggaccacgcaggaaacgaactgaagcttcttgtctctccaattgaagaatgatgattgaattaaggaggagtaccgacatgagccgtattacaagtctgacttgtatcacctttatactgtcatgtattctcctttgcagttgttccggcaaggaatctgttgccaagagcgagcataaggtccctcccagagattccgctcccaaggttcttacgccttgtgcggatgggacagtcgtttacaataatgactatgcatccatagatgcatcaaacacatcccagggctacattatggtcagctactccggggattgcccaaaggtgaaggtacagataaccggatctgatcagattccttatacctacctgctgatagacaggggagcctataccaccttccccctctctgccggaaatggcgcttacacgatacaggtgctggaaaatgtggaaggcgactcttaccttatcgccttatcccaggacatcgatgtcgctattgaagatgaattcctgccatttctctatcccaatcaatatgtatcctttactgccggttcaaagacggttatcaaagggagcgaactggcaaagaatgcttacagcgatctggaagtcatccagaacatctatcactatgtcatcgagaatatctcttatgatactgcaaaggcgaatagtgttacttatggatacctgcctgacattgatgatacgctcgagtcagggaccggcatctgcttcgactatgcttctgtaatgaccgccatgcttcgctcccaaggcatgcctacaaaacttgaagtaggatattccggagaagccttgcatgcctggatcagcacttataccaaagacactggctggatagacgatatcattgaatttgacggcacttcctgggaattgatggatcccacgcttgctgccaataacaatacttcctctgtcggcaaatacatcggcgacggaagccattatgtactaaaatactcatattaatactatgcctaaggaaaggagcccttatgcctaagaaaaatattacgccactatcaaatacagagattgcttccttctgttcccagatggcaatgatcttaaagtccggaatctcttccattgaaggagtttcgatcatgctgcaagatgcgcggggcagcgatgaaaaagaattgctgaccgttatgaacgatgtgatgacccacactggcattcttcatgaagctttaaaaaagacgggcgcttttcccggatacctgcttaatatggtgcgtatcggcgagcagaccggacgcctggatgatgtcatgcagtcgctggccgagtactatgaaaaagaggcctcattggcacagaccatcaagaacgcggttacttatccgcttatcatgatatttatgatgattctcgtaattatcgtcctgattacaaaagtcatgcctgtcttcaatcaggtattcaagcagcttggcagcgaaatgactggcccttccggggccattctgcatatcggagcctttcttgaccggcattccgttatttttatcggtattcttataatcattgccgtcctggctgtctatgcctttaaaactaccagaggacagaatgcattccgaagcctgattgttcgattcaggagaacccggaatatatctgagaaaatttcctcctacagatttgcaaacggcatggcgctgacattaagcagcgggcttacgccagaagagtgtctgaatctggcagcggatctgatcgagcaggatgagttttgtaggagactgtccaaatgtaaggaagcggtttcctccggcgaagatctctgcaatactctgctggaaaacggcgtattttcagaagtatatgcaagaatggcatctattggatcaagaaccggcatattagatgatgtcatgaacaagatcgcccatcagtatgaagaagacatcgacactcacctttccagcatcattgcaaccgttgaacccacgcttgtcatcatactgtccatcatcgtaggaattatactgctgtcggtaatgcttcctcttatgaacattatggctgccctatagcaaaggagttttatgacgcaccgttttgaaagaaaccgaaaaagttcatacattagaaatattattatttctttatcattctttctagccatattactgtgtttctatctctccgtaatgtccgtctccagcgaatctgacaaggaagagtatcagacccttgaaaccgcattgacgcgaagcattacccagtgctatgcagtagaggggaattatccggagagtctcgactatctgaagaagagttacgggctccactatgatgaagaaaaattttttgtagactatcagcctctgggctccaatataatacctgacgtaacgattatcaaaaaggaggagtaggcgtgagattccgtagtcagaatagacatgtcatagattttatatttccattagcggtattttttgtattcgcggcttcttcctttgccgtgctggttctctctgccaacatttataatacgcagacaaaagaatccaacagcaattatgttgcccgcacctcccttgcctatgtcaatgagaagatacgccagaatgatgaaggaggcggcatgtccatccagtctgtagacggacgcgactgtcttgttcttgcaggaaattctgacggaattgcatataccacctatatctatgaatacgatggaagcctgaaggaattatttatacgcgacggcgtgtcagcctctctgaaatgcgggaaagacattatggaacttgagtcattccaaatggaagaaattgaagaagggttatttcgatttgtatttacagacaaggatggcaggaagtcttcgtctcttgtcgcagaaaggagcacgccatgaaacagtcattaaaccggcactccagcatgttcctgatggagatcatgattgcaattcttttcttttccctggtaagcgccatctgtctgcgtatttttactgcttcccgacagatgggacaggataccaatgatctgaatatggctgtgaaccagtccgagaatatcgcggaacttttgacctattccttgaaatccccggaatcttcctccatggacatgaaaggaacctccggctttcttacttctgaatacccggatatcgctgtagatggtaattgtttaaccatatactatgatgccagctggaactgctgtacttccggaaacgcgacatattatatagaggtcaggaaaacgcaggaggaatccctttgcgtgttttgcatagatgcatataagacttctgagaaaaagaagcctgtctattcgcttaatgtaagccttcatccccctcttcatccatagccagcactacattaggataaaaaagggaatattttataaggagcttctatgaaaaagaaaaacttttcgattacaaatataggtaccgtatcactgctgatgattttcatcatcctttgtatggttacctttgccgcgctttccttatcatctgccgcggcagatcacaggttcagtcagaagatggccgaccattccaaagagtattataaggcttccggacaggcggagacaaaacttgcggaaattgaccgtatattggacatagcatataaaggcgccgagtctgatgatgattactatcagcagatcaaagacagccttccggaaatctcccagacgtttacgaaagagaatcccctgatctcataccaggctgagatgaatgattcccaggcagtcttcgtaaagttaagaatcttgtcgcctacggaaatagcatccaatggatcaagcagttattatcagattgtcgcctggaaggaaatcaatacgaaagaatggaagggcgacaatagcatcaaattaatcggtgaagaataagtaggaggaatatccattatgaacttgaatacatcgcaattactagaaaacgccgtacgggcaggtgcctccgacgtgtttatcgtagccgggcttcccgtttccatgaggattaacgggatgatcgccagagaagatgaatgccgtcttttgccggaagataccaggatggttatcgggcagatctaccatcttgccggaaatcgcccgctatccaatcttgaagattcaggagacgatgatttttcattcgcgattcccggactgtccaggttccgggtaagcgcatataagcaaagaggcgccctatccgtcgtcataaggataataaccttcactcttcctgatccaaaggaaatcggactgccggacaagattattaattttgcccactattcaaaggggatggttcttgttaccggtcctgccggcagcggaaagtccaccactcttgcctgtattattgatcatattaataagagttacgacaagcatatcatcacgcttgaagaccctttggaataccttcaccggcacaataaaagcatcgtaagccagcgggaaatcaatgtagatactcagagttacgttactgcgcttcgggcatcgcttcgtcagagtccggatgtcatccttctgggagagatgcgggattatgagacgatgcaggtagccatgacggcagcagagaccggccatcttatcttttccacgcttcataccattggagccgccaataccattgaccggatcatcgatgtgtttccgcctaaccaacagcgtcagattgccgtccagctgtccatggtgcttcagacagtcgtatctcagcagctcgtgccatccatcgatggaaggatggtcccagcctttgaaatcatgaccgtgactcctgctatccgtaatatgatccgtgacaacaagattcctcagattgacggcatcctctattcttcagccaacgaggacatggtatccatggattcaagcctccagaagctgttcaaggaaaatatcatatctgctgacacagcgcttgcatttgctaccaatcctgacatgcttagaaagaaactttagacataaatgatggggatgtggccggcgcgataaacgccggccattatcttttttatcctaatgggtagatatcatactctatatcagaacgtatctttctctctaaaccggcctcatacctgctttttatgcattctcctatctttctggcattctctgaagaagttcccataaccatcaaaagatactgactgctgctatactgtgtaaaagcatcccctttgcgcaatgcattacgtattatttcatacagttcttccatcaagccttgcttcttttcaggatcaaacttatcttccccttcttccagcgtaagcagaagaagataagcagaatctccactccgcctttttccttcaattcctcgctttattattgtaatcctgatagacctgctcccttttcgcttcttctgtaaaaaatatagcaaatatatccaatcctatccttgctgcaactccacatccttcagccattttttctgcgatctgcgcaactctttttaatagcctgtcccccatctgatatccgtatttcagattaattccccgaaaatcatgtatatcgatttcaagaagcatccctgagtacccattttttaggtgactgctcataaaatcttccaactcgttcctggtactcagcccggtcagcaaatctttatatgccatactttctcctttcacattccacacatgctgcttttaatccgatggatgcatcattccttcctcaaaaaccatatacctgcctcgcccattctgttttgcctgatataatgcaatatccgcctgatgatataatcgttgaaagttttttgctatatcatcatcaatcacaattcctatgctcaggcttaatcgatcgggaaggccatccctgatactataattttctgccatatcaagcatctttcgagccttctcaagaacaattttctgatcatatatatcgcgcatgaaaatcatgaactcatcgccgcccagccttgcgatgatatccgttgaacgaaataaagccctgcacatctttacgacttctatcaatacgcagtctccctgcaaatgcccgaacttatcattaatctccttaaaaaagtctatgtctatcagcaggcaggcgtagtataagtcaacgcctttatttcttatagccttttttaccgccagttccagatagcttctattataggcgctggtaagagaatctgtgttagatcgaagcataagctccttttctgaactgatatcaaccactttcccaactacttttgcaagatttccttcagaatcaaatactcctctcatcagcacccttcgccaaatattcttggcattccaatcaactatccggtattctgccttaatcgtcttattgctgatcttatcattagatatatccattattttcttataaatttctgcctcatcttccggtgacactcctaactctttccacccatcagaaactctggcagtttttatgatctttttatgtttctccccagcaatagatgccggatagaatacctgtagttcatcttctctcatattataatcaaagataatgtcatccgataattctgaaactatttcatttctctccttttccatctccaactgtccgatcgtctccttgatctctgagatatcagtaaggatactattaataataacctcctgatttgcatcccttaccttttttccgtaatccataacccacagcagggtgccatccctttttcgtattctgtattccgtcttatattcgtccccttttttgaagcattccctgcaatctctcatagccttcgggacatctggcggatagatagccccttttgctgttcccccgctcatctccataaattcatcataggtatatcctagcatattgcaaagttcatcgtttacatagaagaacgtataatcttcatcatcaaggcttcctttcatccctccagccgttgtctgggcaaggatttccatctgctgtgtcttttcaatcagaagccttttcaggagcctgtaattttctacgctcatctcctccggataatattctttctcttttacaatggaattgggggcagatacatgcatatgcgtcaccttccattggccgccgcataggtgaaatataaatgaggctctctgtctcagactaaaaaatccatttttatccactctggaattaattaaaaactgtgctatgactacagcaaaatcttctcctttgctcaccatgctataattctcattcagaagacgtatttcatacttgctgtggcaccccttctcgaaaaagacttttagcttatcataatcaaaggccattgcctgatcgctgaccccaatccacgatacctgattccggtcgaaatatgataatgcggcattccagtcttgatcaagataataggtatgaattaatccttctgtcattttctgaaagtatccggaatcctgcatatgtctacctccctaataaagattaccaaaatattgatatacggaaattatacatcatctttcagcatttgtaaaagaaaataaaataagaacccccttatctctttcttcctcgtatcttcgaatcatcttagcgatctctctgtttaattcattatcttctacaagaagaatatggcaggcagaaagactgatatcttcttcctccttctggccttgcgcagacatgctggtcctgccttgccttctctgccctctgctcatccagtatacgaaacagatccaatgatattccccgtcgtttcccatctgcaggatttcggtatagatcgatccagtccgtctgtttcatcacatccagattgtgttcgatcaccacaagggtatttccacgggatacggtcagatcgaacaatgaactggcgcctgaggatgttgctcatattgctaacaacatatctcattctccttaaattcttgttatggaggaacaaaaagtggctggtatccatggaaccgtctcactctttgataaccagattccagaactatgggaggaatttcaccgttttaataagaagtatctaaagacggcgggtgcggtctatagcatctgcgagacgaagcagactacctatacgaaagatggaaatatctcatttacagttatcgtagtaaagaactggatggccaggaggattttgaagtttatgagcgcgagatacggtcatttgatgacccggataatcaggttaagatttatattccaataaaataggaacaaaaagtgtctaacaaaaatagcgcctttcatcttccatgaaaagcgccgcttttagcgttccctgcgagaatcgaactcacaactagtgcttaggagaggcactcctaaaggtcaatcagctaccttctaagtttaaataatccccgtatttactcaatgtcattaacttagtatttaggacatactctttttaataagggtgtgtcctttattcttattttgaaagaattttaatccaaaaggacacaactcaccctggagcaaaaaaatattttaagtctagaaacttctcttatgtgtatttgaaaaatttgctgcaagttgccccttggttcggtgataatgtctgtctggcctgattggaactacattagtgcttatttcatcatacaacgcttgtagtagttctgctttccgtttgccatctttttctatgaggacatatatcaaatcattttttaacaaaccgatgcttatatttctatttaactgcattgtatgcttataatcattctttagatgttctttatctctttcttcaatatcacagattatatcttctgccagattactgacataaattgtactgtttatatcctgttctataagtacggactttattcctgtaaaattctcaatctttaatctgtcttttaaaacttcatatgcagtttcaattccccaacgcatatgatatagttccgaaaaacactcctctgggaatatatctcgtggaaggttagtagccagtacttctgatttaccatcctctaaacagacttttacaaatcgcatagtaaacaaatctttgctcatcataatagtttcttcttttttgccgatatagtttcttcttctagactttgtaagttctatttctacatcttcatcatttgattttaagcttttttgttcagttttgtaatcacttgttttcaaccttgcaacaaaaaacacaccttcgtctatgaagcttaagaatgctggtgtggatggatatcctctatccatgacaactaaatatggatatctgtcacctatagtatcctttattccctttagctgttcctgggctactcgcatttcatcaaatttaacagtattaatactactttccagtataaagcgattgagaacatcataaatacatcctaatccaatctgagcacatggttttcctccccttaccgaagcactgccatatttttctacagtttcgttagtggttggaatatttatatctgatccatcggccgcaagaactaaaaagcctttgtaggtatatggctcgatttctaaatcttgataaaagtttttattgtgctcttgataaagatacttaaaggcgtctggattcagtttcattctctgtttaagataacctggtttggatatttcagttcccggatgtgttgttttcatataatttcgcagctccattttgagagttaggcctttgcgattaatcatagaatatactaaatcttctaatggcatctttcttctccttacaagagcatttgttttgccacctcgacacacctcgagaaatgtatctgacagaattttattctgatcctttagtaatctttcttgtgattttctcactacagccctcctataatctactcctcgtcataaacaagtcgaggttttttcttagcataggctgctttcaaatatggaatctgttcttcagtaactgcaccaagattcgcttttactgtctgcacaaccctgccatcaatacgtttgttttcaacaaggctggcataataatacttttcacctttatattcttttgtaagtatttttataaacatgctataccccgtgatatattttctcactacaagtataacatatttacgcaaaatttaaagtgtttttattatatatttctcactactcttaagttaatgacatgacgtatttactgggttttcacggcatcaggatgttatcctgtacctcggtatttctgctgattttaaggtgttttatgcccttcaatttgcaggtgattagcaaaaaagcaggagttgggaaaatactaaatagtaaaaacaagccgctgctgtgtggatacgtcccttctggtgttaggacggctctcctgatctgctctggaacttctcaagaacagtatgtaaataatagactgaaagaaagaggacaactcatgttggattgtcctcttgtgtttctttgggtgcagatgcttgctctatgatctattacttcaatctgcacacacttttcttttatggctcattatatcttttctttgcaacgcttcctgtataacggtataaggcacatcgaatacatagcgtgaaaaatcttctaactgttttttaggataggcagacagacaaaggcgtttcatctcaaaccagacggctcgcttatgatagggtaggtcggatatatactgacatcctatttttgcctgcatatccgtaaaaatatctttcaatcaatcactccaatcttaatacgatatagcagaaggagccattgctccatagatgattactcatccatttgcaacggctcctcagtgtcatatggttttcgccagtgatttcaaaagggctgccatttctggattggcaagaagtttctgaagcagctcctgttcagtctgtgtttcttcaggttcggttgtttcctccggttcttcaactgctggggttgatttgccctgataaaactgctcttcaaatcgctgagcatttaagcgtctgtcctcgtctataatgtgggaatatacatcagctaccatcttgacctgtgcgtggccagagtcaccctgtacggacttcatatcgccaccgttgagtttcagcttataagtgatacttgaatgtctgaagctatgaaatacgacaggtggcaagtcatggtctttgatcagctttcctaaagctcgattgataacctgtccttcaatcggtctgccgcaggaagaagcgaatacgagattaaagtccaagtattcgtctccaaacagtgccttgtagttttcaatttcctcatgtcgatcaacaagcatttccgcaactgttttcggaagaaatacctttcggatactggtttttgttttcggctctttcagcaccagcgctgtgtgtgtacttgccagcgctggcgggaatttaaagacaactcctttttcacccaactgttccaacgcattacgattaacacgctgaagctctttgttgacaaagatgtaggcacatccattttttatgctgtcctctgaaatgtcgatacagtcccaggtcagtccgagaagctcacccattcgcaatgagcaggaaaaagcaagattaagtgccaatgccagattgtcatcgtcacaaacttccaatgctttgaacagtgtttctgctgtccagattgcacgctctttatgttcttcttttggaagggtagcattaagaacaggattccttgacatcagttcccattttactgcctgattaaaggcattgcggagcagcttatgaatctctctgactgtatgggcggtgagatattcattgttcggcctgcggttatttaccacttttgccttgaccgataataagctctgatagaatttgtccatagttctcggtgtcagatcttccagtttaatatctccaatcagcggagtaatataattgaagatcaggcttcgccttgcttcataggtcgataatgcccaggtattcacaccataaatagacatgtattcttccagaagatcactgactgtcttagcggaaggggtaataaaagtacctgtctcctgttcaaattcaacctgcactttgcgctttttggcttcggcattagtggcaaatgtttcccacttttgcctctttacgccgttttcatccgtatagctgtaaaccacagaatagcggttttttctcttaacaatagatgccatgtaaaacacctccttattctcttgtttcgagccatgcatcaaaactgctttttacgattctgatgccacgattcaatcgaacactctgaaacacattctgatttatcagcttatatgcagtggggcggcttattccaagaatctgccgaatttctgcaacagtatagcttttcttattcggagcagtttttgaaactccatttaattcagcgatgcgatcttcaaacatgctgccacctcctcatttttgataactttcttatagtgggattgagagttgtaccaatcctcgaagctatctatgtaaatacgggtatacataccaacctttaccgttttgaagggtttcttcttcatcaagtcatatagggttccttcagcaatcccaagtaagcgggcagtttcctgaattgacattgtgatggatgtccaattctttcccggtgcttcaccaattattttcttataatgaagctggttggcataccagttttcaaagctctcgatcatcacacgcatcttaccggcgatgatgaccgtatcaaaatagttctttttcacgagccaatatgcttccgtcttgccaagcccaaggagccgacgcatttctcgcacggacatgcttttcttcttcattgtattttcctccgattcatattttttttcggctcgtcagccgttagggtatgctatatagccaagcatctctgcttggctatatagtagggaaaatcggagaaaaagtgaaatgtgcaaatccgacagctcaagggatttttcacatttgacaagtatccatctgtttatcaagccaatcgtcaaagctcttttttgaaatacggatattgccgccgatacggacactgtggaatacgccagatttcacaagattataggcagaattcctgccgatgcctaaaatgtcctggatctcatcaactgtataaattcttttctcatatggaatactcggcatagcttctgtatccttatttaatgctgtaattctatcctcaaacatgagaaatcctcctttctgctttcagctctttttctgcgcccatgctgataaataggggtaaaacaatcttttccatagattgtttatcaagctgtgttactttctctttgagacggcttttgtcaatcgtgcgcacctgttcaaagagaataattgaattttcgggaagcccgtcaacatcttccaaatagtaatgtgtcggcagcttcgttttctttcgtactcgacttgtaatggcggcaacaatgaccgtagggctaaacctgtttcctgtatcattggaaagaatgaggacaggtcttgtgccgccctgttcagagccgatatgcggatcaagttttgcgtagtaaatatctccacgcctgacagttcttttcattataaatgccctccaatcctatatttgacataccgtttctgtctatgtaataagccagacgaaaggctttgtgaggtcgggagcatataaaacaaagctctgttctcattgataaccttgtatctggctttatgatcatgacatttctatttgtcctcgacaccccgaaatgccaatgcgcaaaagcgcagggaaatcgccaaacggtcagcagcgaactgactccacgggagtttcaccccaactgacggtctgccagagccgccctcattgcctgcggcggattggataccgctcggactgtgactggacgggagtaccattatgctctttgtgggttatggcgaaaccgggggccacccgatatttggagtcagtataggctcgctcaccacctttcatcgctatttgcttgtcggcaggtcttggcgtactgctccgcacgcttatgctcatcacaatcacaaagaggaagtatttggcgaatgactattcggttgtcaaggaacaatcctgtttacgccacacaaaggaaaacagggtggaggatttcgtcctctcaccctgtcgccaatgggaaactatgaatttcccctcatattaaaatatttttttgattttttctttcagcctgtccatacgcctgtaaaccgccttttcggtaatcttcagatacctggctatttcatgagtgctgtacccctggatcttcatcagaacgatctgaagggtaagcctgtccacggtgatcagcacatgatacaattcctgattctcaatacgatccaagaagtcctgtactgttttcggttctgcctgatcggtggatgctgcaacagtatcaaggtatgtacctgtttcctgcacacgctcataatagcgtctgtctgaattaaatgcctaacggtcatagagacggatttcttcgatcatatcttcagaaacaccgctgtctcttaaaatcttttcttctttctctttccagagcttccatttgcgctctgcttttccatggttatatgccattttccttacctccaatctgatttgtttgaacattcagattggaaagggcggagaacggcagccgatactggaagatggcttgtcctttttcacgacaaatatcgacaaacaaaaaaccgcaaaggctgttaaacctttgcggcagtgagaaaaataagaactatgttgtagaaacaaggcttctacatttgaagcgtgagaataccaatgacagtagaagctttttttgataaattatcctcatttataatcgaagctgtgtaaatagtcgctgcttcggataagcagcggggcggctgaagcagaccagcacataaaaaaatccctccaaacccaaaacgggttcagagggaagatgtgtaataaggcatgatgaagccgcccaccgaaacaccgttttttttattcggtgggcttatcctttatctcttttgacagggcagaaatctcgttttcctgatttctaaaggcagcctttttcaaccgttcaaagctttcattactgattacatgttctatccggcaggcatcgacttctgcagtttcaggatcaacacctgctgcaataagctgttccgtaaagaagcaatgacgttcataaatcttttcggcaacctcccggcctacatcggtcaaatggagaaggtgatcttcttccattgtaagaaagccgccgtctttcagggtgttgaccgccacacaaacactcggttttgacactcccatgtgccgggcaacatctacggagcgtaccatgccaagtttcttatggagaacaaggatggtttccagatagtcctccccagacgcatgaagtttcattaagacctcccatcaaactgataatttttgctccgcgttccacatagcagcatatttcccgcctttagccagtaattcgtcgtgagtaccagcttcagcaatttttccttcagataccacaagaatttgatctgcgtttttgacgatggaaagggtatgagcaatcattaccacagtctttttctttttcagcagattagcgatggcctgctttactgccagctcgttctcaatgtcaagggacgctgttgcttcatccaaaagcaggatcggactgtttttcaagatagcacgggctattgaaattcgctgacgctcaccaccagaaagaaggtttccgttctcaccggttggcgtatcgtatcccctttccatcttgcggataaaaccgtcacagtttgcctcccggcagacggcctcgatttcctcgtccgtggcattgggacgggcgtgccggatattgtcccggatggtatcgtcaaagagaaatacatcttgatctaccatagagatttgttccaacacacgctctgcggctacatggttgatcggtttgccgccgattgaaatggttcctccatttgcctcatagtattttgcaatcaggttcaaaatcgtagattttccggagccggagtccccgacaatggcagtcagcttttggtcgggaactgagaaggtcgcgtgtttcagcactgtctcatcgggaacatacgaaaagttcacattgtcgaaggtgatttcatgggtaactgtttgaagcggttccatactgccggtttcctctggttcgttcatcacacccaggattttgtttttggaaatcatcaggttcttatagctggtgaggtctacaaaaatcgagttcgccagttttgcacagaacaggggcagcatacagatcaaaaggaagtctaccgtgttcaatgtcccgtcagcccagggcgcataagccgtccagataaccagtgggcaggacaaccaactcaaaataccaaatccagctccgataggcagcacctttgcttcatacacaaaactgatccggcagaactcctgcatggcgttgataacggttttattcttcataccgcctatgccataggtccggaaggtctgaatgccagaaacatactccacaatgctgctgacattttccgcgcatatatcgttcttttcttttccatatttccgcaccatgcggaaagaaagccacaaaccagggattaagagaaggtcggcaatcagcaggataatcccagccggaacatagatggtcataacaaagacgatcagcatcaatgacagcgaaaaactctttgccaaatccccaatcttatgggttaggattttttcatagttgtttacatcgcttgtgatagtgttaatgtaatcgccggtctgtccttgggtaaactgggaaagcggaatgcacttcaaatggtcgcccataaaaagccggatattcttgctgacctctgcgccgccaatctgcgctttggtatagccgtagctgtaaatcaggatacggaaaagaaaaaccaacgcaattatgctggtcagaaccaggacacggttcatgtcaaattgccccgaccacaaaaactgcataacagagtaaagcagcatgaacaagctgccggagagaagcccttccagaacagttccgacaacgccaacatagaaattgcggttcttcttcaatacatcatgctcactcatgcggctcgcctccttccaactgataagtaatattccgggctgtttcgtagtcctcccacgcttttcggtaataggcgttgttctttctgacttccacatgggtgccaacactggtaatcgtatgattttccaccacagccacccggttgcacattttcaaggcactcaaacggtgtgctaccacaatgaccgttttgcccttgcatagattttgaatggccttatcaatctccatctgattttccgggtcagaggcgcttgtagcttcatctaagattaagataggggcatttttcaaaatagcccttgcaatcgcaatccgctgtttttcaccgccggagaaacgggaaccgaaactgcctaccttcgtatcatatccatctggcaaagacatgatgaaatcatcaatctgtgcctcttttgcggctgcccgcacttcttccaaagtagcgttgctacccatacggatgttttccagcacactgtcacgggtgagaaaagtcttttggaacacaatggctacatttttcagaatggtatcgtagtcaagctccttgacattttttccgccaataagcacctcgccttcctgcacatcatagaaccgggagatcagttcaatcactgtgcttttaccagcaccagattgtcctacaagcgccatgcgttccccgtcattgattttgagattgacgccttgcagtacatcggtcttgccgtcataggaaaaccaaacattcctaagctcaatatcgtgattttgaggaaagtctgttccaccttcatagattggaatatccagtatttctttagtcttagtaacagcgttcagtacatttgcgaaatttgttcctaattcctgcaaaggtcggatttctgtcagatacatagagccgacataaacaaacagtaggaacgcactggctgccagtgtgcctttcaagaaaaacattccgcctatcggaaccatcagcaacattccacactggtgtggtataaaaaagttgacagcttattctcaaggatttcataataaaaccaagagaataaggaggtatttaaagtggcacgtaaatatgaccatgaatacaaagtacaggcagtaaaacttgccaaagaaatcggtggcgctaaggcagctaaagaactaggaatccctgaaggaaccatgcatacatggctgaaagccgtaagagctggtaagttggatattggggaaggttctcatacccctgccagcgcaatgagcctgtcagaagagattaccatgctgcgtaagcgggttaaggagcaggataaagaaatccgccgcctgaaggaagaaaacgaatttttggaggaagccagtgcttttttcgccgccagccgtcggaagtcagcaaaaaccagagaatgatctttctggctttgaaaacagaggacggcaggatgaccgggaaaatttcattttactgccggatgcttggtgtcagtcggcaaggcttctataaatatcttgcaaacaaagaccgtccctggaagtaccaggatctggcggatgccatgaaagagattgccagcgaggatgaatgtaacgatacttacggacggctccgaatgtatcaggcgctgtgcctgaagcagccggagggagtatcaattcccagcgagagaaccgtataccgggttatggagcagattggcctgagccatcggccaaagcgaaaaccgaacggaattacaaaggcagaccgggaggctatgaaatcggatgatttgctgaagcgggattttcattcagatgccccattgaaaaaatgtattacagatatcacggagatcccggcatccaatgggaaactgtatgtatctgcgattttcgactgctttgatcttagtgtccttggtctggcaatggaaacaaccatgaaagcagatctgtgtatccatacactggaaagcgccctgactgcttatcctgcactggaaggcgcgatcatccacagtgaccgtggaacccagtataccagtgaggcctaccgccagaccatccggaagtaccacatccatcaaagcatgaacagtgccggaggacgctgccatgataatgcccgctgcgagagcatgtgggccagaatgaagacggaacttctctacggccgttatgacacaaagcagatgacggtagaggaattaaaagtactcatttggagatatttccacagttactggaataaccggaggatctgctctgccaatggcgggcttcctcctatgataaaacgcaggaagtattatgaggatttggaactggcagcatagtcagtgatatccttgagaaaaatgtgtcaactaatattgacaatatcacactcaataataacgacaaacgctgcatacggtggccccatacgccgtgaggtttcattccacatggcattttcctcttggatcgcacccgaaaacttctggaatgacttgctccccatgttataggctttaatcagtttcattccgctgatatattcaatcataacggagttcaatgtagtaatggagcggttggctcgttccattagagcatctgtgttgcggaacatcatccccattaccagtacggccaaaaccagcggaacaagggagatcaaagccagcggaacattgactgttaccagataaataaaaataacaaccggcccgaccagatagcaaacaaggtctggaaggttatgggccaggaacagctccaacttttcaatatcttcattcagaaccgttttaatatctcctgtgcgccgttcattcaaggcacccaaaggcgctctcgccatgtgttccgccaccatacagcgcactttgaacagtgcgccgtatgcgcctttatgagctgccacaccggaacagccaaacagtgcaaaacgcagggtgacagcagcggcaatcattgccacagtctgcaccacaagttcttttgtgcaggcattgttgattgtggcgtccatcagcctgtaaatcccaatatacggaacaataatacaaaggccgctgcacatggacagcaggattgccagaaacagccagaacttctggactccagcccaatggagcagcaatgctactctattttcctttttctgcttcatagactacctctcctttccatctgaaacagagaacagctctctcaatttcgggagggcatccattgtaactggtacatcatcgggcatttcgccctcgtcaaaatgcaaaacacgggagcaggtgcggcagacaaattcaaaatcatgggtgacaacgaaaataatctttcccatatcggacaaccggcggatcagccctgctacctgcgtcatgctgtcaaaatccaggccgctggtcggttcatcgaataccaacaggtctttcccacaaaccatactgacggctaccgccacccgttgtttttggccgccggaaagtgtgtttggatggcgttttcggtgtgggctaagccccaattcctccaaagtcgcatttaccagcgtttgatctggattgcggatgccaaaggaacactctgcctctacactatcagcaaaaagctcataatttacatcctgcataaccatataagagcgtttcagccttgccttgcgctccatcggcttgccttcccacaggaattgcccctcgaagtctttatgaagcccgcagagggcgcgggaaaatgtagtctttccggctccgttatggccgaccacgccaataacttcaccctttcctgcggataggccaatatcatgcaaaatggttcgcttcttgtaacggagcgtcacattccgcagttccaataccggggtagtggcaagcaagtgggttttgggtggaaacaccgcccacagattgactgcccgcaggcccatgtgttcacgctcttgttccgatagctgtcgaaatttctccggagtataaatccctttgatttctcctttttccagataaacaatcctgtcggccagttccatcaggtagtacagccggtgttccgctatcaaaaccgtttttccttgtttttttatcagccgcaaatgttccctcaactcctgaatggaagtcatatccagattggaggacggttcatccagcaaataaatctgcgggttcatggcataaacagaagcaaaggcgattttctgcttttcaccgccggacagctcaaaaatgttcctgttccgcagtttttgaatacgcagatcttcggctgcctcttttactcgctttatcagctcttgtggaggacgggtctcgttctcaatgccaaaggcaatctcgctgtctgtgtccacattgaaaaactgtgtccgtggattttggaaaacggagccgaccttagcagcaatttggtacatggggaggctgctgatttcatgaccgtctaccagcacacggccatggaattctccttggtaaaactgagggatcaatccatttaccagccttgtgatcgttgtctttccgcacccgctgcggccacaaaacaggacacattctccttccgaaattttcagattaatttcatgcagcccgtcatgttcctgccccgtgtaggaaaacgatacattttcaaactcgatcaaccaatcacacctccccccacacacaattcaaaaatcagaaaagctacggcaacagccataactccccaatcagcagctccgcattttatctggataagacaggtgcggggatggggattttcaattccacgagtgacagaggcgatggaaagttcatccgccgcttttgaagccgccatcatcaaaggcacatagatacactcaactgtcatgcccggatgcgccaggaagcctgccagagaaggtgaaacatctctcatctgcatagcatccttgatgtaacgccagtcctcttgaatggttggaatataccgcagcatgactgccaggggaatgactaactttttcggcgcatggacacggttcatcgctgacagaaactcattaacttttgtggtagtcagaacaattccggccagagtcccgcacgcatagactttatggaacaaacctaaaaaggcgatgaacattgttcgtagcgtgccagtcaattctgccataatccaaactgtcagggcgcagataaccgcataaaagcatactgccttaatgacatatttccattttccaaagaaggcccctaataccgcaatcagcacaacaagagaaaattgataggcaagcgaaggggcgaacatggaagataaaacacacacaagaatgagaaaaagttttgctcgtggatcgagccaaatccctttcttatggcgttcaccgctcatgccgtgataccagccttttcaaactgttttttcagcattttgcagcctacaaaggcgctgatcgcagatgtaacgatagcggcggcaaacatggcaacaaggatgccggtgttagcggttgcctgcatagtgtcgatatagctctgctcggttccattacccagcatagtctgcgcccagccgttgggatcggcaaagaaaacgatatacgatccagtaccgccgagagaaaacaggatgtatgcaagactgttcagcttcttgcttttgtactggcccgcaccggaaacaaagtcagcgacaatcgccataatcagatagcccaacgcaaaagcccagtgcataccggtcacgaaccagataatgcagattacaacacccatgatagaaaggctccaccgtttctgaacctttgcgatcatcaataaaaagactggcccagtaagcaggccgctcccggctggcatgaaaaatgtaagcacggggttaggcgcaaaaaggataccacccactaagatgaaaacgaataccagcgcagtaaaaatacctgttgttaccaggtctttcacggtcagacccttgttcatagaatttgtttgattactcattttgatcctcctacctttcgttgtcttgactcgacaagcagtttgtgatattctttggttagctataactaaccatcatctaatacagtactcttgtgccgaataacattcaatagggtccggcgatattcgtctgttcctttcaaaagttcgtccaatcgttgcaaaaaggaggcagtctgtttttatgtctgaaattatagaccaattttatacacctctgctgattgaacacggttttatccgtgacccaaacaaccaacaatacggggcattaggtgtgtgctggaaactttctcccgaaatcggagaaggcacatactggacttatggacaaaaaaacctatttgatattaaaatccataattttttcttccacgaagatttcatgttggaatgttctttgccggaatgtttgagtatcactcggtatgactctatctctggggaggaattatctccataccgcagactgtctgccgggtgtattaaaacatttatcggagactacgccccatacaaggctttaatacataaaaacattccaattcgttccattggaattgaaatcgcaccggcgtattatgaggattatttgaaaaagctgtacccggaggcacagatcaatccagttgacgcttttcgcaaaatcgatcaaacctcggattttccagaaatgtcacagttactcacggagattaaggactatcgcggggaagggcttgctgcaaaacttttttatgagggcaaagtcgcagaagctgtttcaatggtagttgaatatcagaaaagacatcctgataaacctaccaataagctctcccggcaggatatagaaagtatccagacggttgccgcatatcttagcgaccactatgcttctgatattcctctggagcggctaacgcagattgcctgcatggggacaacgaagttgaaaagttgttttaggaaatactacgattgcaccatcacagagtatgttcagcagcggcgtatgagtcaggcagaatatctgttagcatacacagaattgacaatagggcaggttgctcaaaccgtcgggtattccacttcaagccgatttgcagaattattccgtaaaagtacagggctgttaccgggggaatatcgtaaaatggcacagaaataatggcttaaaaagtacctacattcttcctaatactacgtttgaaaatttctaataaatgataagcagggcggagtttgttctcacaccctgctttgtgattatcatgaattattcaaagatcttctccactttttctttcagcctgtccatacgcctgtaaactgccttttcggtaatcttcagatacctggcaatttcatgggtgctgtacccctggatcttcatcagaacgatctgaagggtaagcctgtccactgtaatcagtacatgatacaattcctgattctcaatatgatccaagaaatcctgtactgttttcggttccggctgatctgtggatgctgcaacagtatcaaggtatgtacctgtttcctgaacacgctcataatatcgtctgtctgaattaaatgcttgacggtcatagagacggatttcttcaatcatatcttcagaagcaccgctgtctcttaaaatcttttcttctttctctttccagagcttccatttgcgctctgcttttccatggttatatgccattttccttacctccaatctgatttgtttgaacattcagattggaaagggcggagaacggcagccgataccggaagatggcttatcccttttcccgacaaatatcgacaaacaaaaaaccgcaaaggctgttaaacctttgcggcaataggaaaaataagagctatattgcagaaacaaggcttctacatttgaggtgtgagaataccaatgacagcagaagctttttttaataaattatcctcatttataatcgaagctgtgtagatagtcgctgcttcggataagcagcggggcggtagaagcagaccagcacaagaaaatccctccaaacccaaaacgggttcagagggaagatgtgtaataaggcatgatgaagtcgcccaccgaaacaccgttttttttattcggtggacttattctttatcgcttttgacagggcagaaatctcattttcctgatttctaaaagcggctttttcaaccgttcaaagctttcattactgattacatgttctatccggcaggcatcgacctctgcagtttcaggatcaacgccagctgcgataagctgttccataaagaagcaatggcgctcataaatcttttcagcaacctcgcagcctacatcggtcaaatggagaaagtgatcttcatccattgtgagaaatctaccatctcgtagaatagccactgtatggcgcatgatgggctttgcaaaaaaagtcgttacgctttaatgtttcctttcttccttacaaaaactgtccctgttatagcagctgcaagactggctactatatgactaaccagtaccgcaacccaaatcccgtttagaccaaatcccaaataagatagcaaataggccaaaggtatccgaactacaatataatagaaaatcatcaagaacatgctttttgacggctttcccatgccgttaagcgcacccaaatagcagtttgtgactgtgttaagaacatagccgatgctgacaatcagaaaatatgtaccgacaataaccgcaacatcgctgcttctgacgaacaggccggaaagctgttttgaaaatccaactaccagaacagagaggatcacaagcagtccacacccatatcccaaagcgcatttcaaatagtcttttgctcgatcatatcgcgctccaccagcacattggccgatgatggtggttaaaaccatgttcagagccatagccggatagaacaggatggtttccagttttcccgttaccccataagctgcgattgccgttacactatatgtactgacgagtgctgtaagggaagttgtgctgattgctggaatgctttgctgaattacagagggaattgctttttgaatcagcagcagaacatcattacaattaaaagcagagattttgaatgtaaataactttttctttttcagatagattagcataaacagcaggcaaatcatctgtgaaagcaatgttgcaatcgcggcaccatgaaacccgatgaaatgaataaaaatgggatcgagaattgcgttcaaaatggttgataccagcatcgcaacagcctgaaacatagaattaccaaagctacgcaaaaccgcagtgaaatacaggtagaggtaaactgccagatagccaaggatataaattgccaaatagctatatgccatatcataagtttcagcaggagtgttcaaggctttcaaaattcccggaagaaagatttcaagcaaaatggtgacaagcagggaaaatgccactgctacgcagaacgatgtagctatcaaactttcggtctttttcttatcctttgcaccaatggcttgtgagatcaaaatagacacaccgtttgttgctcccatggcaacagaagtcaaaattaaaatgatgggagtagaatttgttaaagcggcataagccgttttaccgagcagatttccaatccacagactgtctacaaggttatacatcatattaaggaacatggcggcaatcatcgggagcgccattgccataaggcaacgctttgtgttaccacctataaaatcaattttcgttggcataaatcgttcatcctttccatgtataatgaatgaataacattcatatagaaatcaaaaataaatcccgcttctcacggtatattatattgaatgaatgttattcattttttgctttttgaaaatcccccgtcccaaaacgggggatcatctcaaaggtgaagtgcaaatatgagaaattcacgaatccgtttggatttatcttcttgtgtaaggtcgtctgtcagtagaataccaagttgcccatatacgcaaaatgtcgcggcggcctgtaaatcatcaaactgaatttcgcctttttgtttggcacgttgcagcagtttttctacaagcggtaccaacttctcgcataccttaagggcaagctgatcgtgaaattttctgttctccgttccgtgaaaaacagaataatattttgtatcctgtttttccatagtggcaggcatttcttcaataatctgacgtaaggttttgtgatcgtctttttcggcatctgtgaattgctctaccaacacatcggcatattgttcaatcgcactgtcaaataaaacctctttggacgggaaatagcgatagcacaaaccttgtgccacaccgattgcttttgctatatctgtaatcgaggttttttcatagccgttttccccaaacaatttgagggcagtatctaaaatttcctgcttgcgtacttccggctcttttgtaactcgcataattttaagcctcctttttttatcatatcacccccatacgaaaaaaacaatgagtgaatatcaatcattttttgcccatagcaatacacgcagtatttccaatctgctcccacgatacattacgaaaatattctgaaagcatagaaacaatttctgcttcagagtaaatcttaacatccccctctttgctgtgacgcatatagaaattcataataatgcgccctacaagcggctgccaacaatctcccatcaggaatgtgccgccgggtttcaatacccggtgtacttctcttaggacattcatcggctctggataatggtgaaacgaatcattgcaatacacgacatcaaaagtattgtccgggaaagggagtgcctcactgtcacccaacaacaatttcacttgctccggtagctttgactttgcaacatgaagcatttgttctgacaagtcaattccgtataattctttgccaatatcttcttgcaaaataagttttaacatctcgccagttccgcaccctaaatcaagggcagattggaatggaatgtgcgacagcttttccaataggacaggataaagggagcgggcgtgtcggcccttaatatcgttgtcataggtagcagcttgctggttaaaggctgcctttgagttttcttttatagtattcatggcattgacctcctttccatctatcagtataacaccattttttgaaatgtcaatgaataatattcattcaattatgcgaatttatatttcttctaataagatgtataatctcttataaggagaaatttcacatcgtttcataagaactctgacctctgtaaaatagaaaagtaacattatattgctacaaggtggtgagcttatggacgaaagaaacaacgattttgactttgattttatgcccattggacaggcgatcaaaaaagcccgtgaagccagaggaatgaccagggagcagcttgccgggatcattgggtatgctccacgacacattcagtccattgagaacgagggacagcatcccagtattgagctgtttattcagctaattaccatgttcgatgtgtctgttgatgaatacatatttcctgaaaaagaagttaagaaaagttctgtccgcagacgcttagacgcacagctcgacaaactcaatgatagagaactgtccgtcatagaagcaactgtgaacgggttatgtatggcaaaagagccagaggaataaaatcctctggttttcttttgctgatttttagtaggctggaacaccatatccataaatagagctgcttccaatcgtatattgtctctgttttaccgcatcaccggaatttccttctacggtgtagacaactccgttttcgcatttctctacaatacctacatggtcggttaaaccatcgccttcccaatcgaagaaaataatgtcccccgcagtaggctcatagtttctgtcctgccattggttccgttctttaaaccagtttgcaccgctgacgcatcctgcaaacttcgggataaagccaccttcgatataaccgcactgctccgcacaccatgaaacaaagcaggcacaccattcttcccggctgctgaaaccataccatgaccagtagggctgtccgccctcattgccaagctgcgtcagggcaacttctacgattgcctgattaccgccactggtaaatgcccgcccgaaaggataatagcgcagtacatgagaaacatactgggtatcaccatagctgtcccatcccaatcgctctgcctgaattgtggaaaactcaaccgcattggcataagtgtagccgccgtaattggtctgcgcccaggaaatatagccatttccaaagttatatccctgcagggccagtttgatccgatccatgtcaatggggttttccacttgtgcggcattcaggcaggcagctaaattctggataccgacattgatggaatattccgggtctgtaatgccattgggggtattcgggtactgtgtgttatatccacattccgacgcctgcatgggatcgtttccctgtcctccagactcctgcatcatgaccgccttgataagttccacatattcaggaatcccatgctgctttgcatatttttggatcagcggttcataggcttctacctcggcactgaccggagtataggaagtgctttcactgccgccgccaaacagggagatcgcacaaccaagcaataccacgatcaaaataatcactattgcgatccagccgcctgcaacaatcgctgctatcaatgcttttgttcctgcaatgatcgctttgacagccgctatggtggctttgacggttgttttagccgccgctgcagatgcctttgcggatgctcttgccgcctgcgctgctttctgtgcggttttggcagaagcctttgccgctgcctgtgcggttttggtagcctgctgtgtggtcttaatggccgctttggaagtcacctgtgctgtttttacgcttctttcggttgtttttacagagccttttgccgctgccttgacggtttttcctgcgcttctggcagactgcttaatcgttcttttggtatctgttgatgtttttatggtctggacagaagcatccgaaacaggagaacggcctgcagttccacgatggatctgcaagccgttctgtccagacacattccttgctgacctatgctcagcagctttggcagcccgcttctgcttaaaatcagccattttgtcctttgccttaacgacagtttctttggtagtcttaacgcctttttgcccttgcttattgaactggtggataccctcatcttttacccggtcagaagcatgggagatcttatccgcagcatattccgtagcagagccttcgttggcataatacccttcttccgctttctcctttgtctttgcataggcagctttcatacgctctgaagcaacggcggctttatctatggtcttaatcgtgcctttgactgcatccctggttttaatatcagccatagaagccctcctttcttagaagctgtactttcctcatgcagtcttttttgctaccacgacaagccttccatttgtggccgaatattcacaggtagaaagggtaatcagcctgtcgccatagtctgcggtaacatccgtatcatacagggcaagctctttacacgtttggatataggcattaaattcttcctcattcttggcatctacaaaatcataatagcggtagccgctggagctgtaagcgactgtcttaaatacagcaacgatctcatactctgcctgttctgtcagggtatcaaactgaatggttttgtgttcctcataaaagcttttggatttataatcctccaaagctccaaacatgcggttgccgctgatgtggtgtccgtaaatgattagattatcactggtaagcaggtcacagttttcctgaatatacggagtacctaaatcactgtactgcttctcaaaattgtgtttaagataataattcggttcatcctttgtctgcataacagggtagttaatggatgtgccggaaatggaaatccagcccaccatatcttcattctgcaaatacagctccttatatttggacaggacatcttcaccctcgctgacgggaacatcatcaggaaccggttcttcatcgggagcctgtgccaccacttctgcaatctcatcaaatacttcggtctgctcgtccagctgtgcgtaatgatcatagatgtgataaacagaaaatgccgccatacctaaaaggcacacggcggcagcaaggcagatcatagattgatattttttcatgggtttctcctttcttagcgtgacaattcgttttgttttctgggtgcgggaagatccctgcaatattcgggatacctgaccttgatgccctccatgaagtagggggcaaattcacaacagaacagatcttccggtgtaaaagactggggactgtccatgtcggtgtaaccattccagaggttaaaggcaaggcgacaaaccctaacagttccgctggtctgccatccgccgtgcatcccgtccggctcgatacagtcattcttaaagtcaaacatctggtcgatatttgcccttgtttccgaagcaatccccatgacatagaaaaatgcccggtgatagcagtcgttgactctgcacttactcatgttttccagaaagaaatctctatgctctgcggagcgaaattgaatattagacatttgaaaatacctcctttatccgtttttgcgtaatcttaaaatatgcctcattgatctctgcgcctaaataatccctgccgtttgccaaggcagccaaagcagtgcttccagtccccataaaaccgtcaaagaccagttcctttctggtactggaaatctggatcagccacgacaaaaactccacattttttacggttggatggtaaatgccatgtttcttctgccatgtggcattgtaggttgccttgggatattcctcgccaaaccagcaggcagggaacctcgtcttgtatttcttacttggttctctgcctttatggaactgtgtgccttcttttttacggttctccagtaattgtgtctgctgaaacaatcgccgtcctttctgacaaaaaatgatccactccgaattattggcatagctgcctttcagatcaccgatgccgcccagtgttcctttctccaccaccagacagttttttaccgtaaatcctgcttttcgcagacagtcgtaatgaaaagaatagcagtcaaaccgggtaaaaaaataagcgtgggaattgtcccgcaaaatacggtaactttcccacgcaaagcgttcgtaatcaatcccttgatccccatccaatatttcatggggctgtctggcaaaatggttctggtatgcaatgccatagggcggatcggtcagaatcagtgacacaaagttatctgggatatgcgccatcagctccatacaatccatacagtaaatttgattgcgcagatctaaacactctgtctcctctctcactttccttatacctctccaaacttggtcgtcatcagtttatacagttcggtgttatgtgggaatttgttgacaaacggtacaagggaactgcctacctttaaaagtccctggcctgcgcctacattggtgatatagcccatctgaaggtcagagatgttcaaaagtttggcaagctcgattctgtccgtagatgcctgattgagcatgatgataaattcagagttggcaagcattgtccttgcggtatggctctggagcagatcatccacattctgtgtgataccggtacagtacgcaccatatttacgcacacgcttccagagggtaaagaggaaatttgctgagtattcatgctggaacagcagatagatttcatcaatgaaaatgaacgtgttcctgcctttggctctgttctgcgtaatgcggtttagaatactgtccaggacaaccagcataccgatcggctgtaactgtttgcccagatccagaatgtcatagcagatcagacggctgtgggtatccacattggtgttcttggcaaaggtgttcaggctgccatcggtaaacagctcaatggcaagggcgatttcctgcgcctccggctcattctgtttgagcagttcttcacggaagtcctgtaaagtaggcgggacaccctgataattgccctgctgatagtgtcggtaaacactggccgtacagcggtcaataatggatttctgttttgcccccagacttgcaccgccaatgagctgttcacagagagacaaaataaactccgatttcagaatgaccgggtttgcgccgtcaccgtaatcggagttcatatccattgcattgatgtggttttcactggtcgcagaaatatggatgacttcgccctgcatggccttgaccagcggggaatattcccgttcaggatcgataataatgacatccgcattggggtctgtgaggatgatatttgtcatttcttcttttgccgtaaaggatttacctgcaccagacacaccgagaataaaggagttgccgttgagcaggtggcggcggttggcaataatcatgttcttgctgatcacattctgcccataatatacaccgtctttgtggtagatctcctgcacccggaacggtataaatacggcaaggctctccgttgtcagtgtgcgcagggcatcgatcttacgcacaccaaacggcagcgccgtgttcagtccgtccatctgctgatatttcagcaccgcaaactgacacaaatgctttctggcagtggtcagcagggcttccgtgtcgctgtccagctgctctttggtttcagcagtatgcaccagtgtcagcaccgcaaacatcattctctggtcacgggttgtcaggtcgtccagaaattccttgctttccttgcgctgctgctcaaggtcataagggacaactgcggagaagttattattctgattctgttttctctgccagttcgtgatattggtttcgacaccgagcagtctgttttccacttcccgcaccgcttcatccgtgggaaccgggacaacatcaatggacagcatcatgttacggttcagctcacaaagctccgctaccatgctgtctttgatataggcagcgtattctctaaggaagatcacacgcccgtatcggtcgcccatacggaaacagtccttttcaaactcaaaggtgtccgggcagatgaagtccttaaaatcgtgacctttgcgcatactctgtaccatatcgaaggtaaaggcggtttcttcgccggtacggtagaagtcatggaagatacggagtttttcttccgcttccagttccacgcatcgtgcgcccaggcgggaaaaatgagtgacaaggtcggcacccacacgggcaaaatagttccgtgcttcttcgatattctttttgcatacagaaatggtcacatatttgtcctgcacaatagagtttgctcctgttgccttatccagcagcatcttgttgtattccttacggtacttatccagaccgtcctccgccatggggatcaggatggtctgctcaaaatccacccggttcagacgtcggttattgatggtgagctttgtggtagcgccgctgtcaaatgcattgagcagttcagagtattccaaaaacatggcttccttgtcctcacggctggccacggcataattgatgtcctcaaatttaaaggtctttgcgtatttattcctgcccacaagaaaaatgccatcttcccagatggtataaatgggaatgacattctgtaccgactttggcaccacaaatttttccttatcctgcttgaacagggttctcagtgttttaatcatgctgcgcctcctttattctttttcgttttcttcttatcctgttttttctcctttcgctcttttcgtctctgtttcctgggaacgacaggaagtcctttttctctggcttcgatgctggacttcatggcttcgtaataaagattgtctggccggaacatcagtttcttgggcatcagaaattcggatttaaaccatgcccagacaaactgttctgcggtcatgccgttatatttgataaagcccattgccgcaaaggggaaggctcctaaaatacatacccagctaagggtttccatgccaaagtatgggcggagaagaaaatacaagcctaccgcaacaccgcaggcaaggacagaaaaaatgaactgccttaatgacagtccaaaaaacatgctttccgtatagttacggatttctttattgatctttacttccaaatggatacctcctttataagcccatcatttcccgtacaacacggtcagccattttgatcgcaccgactaagacgagcatattaaataccagttccccgatgtagctccataccatagataccgctgccgcatccgggttgactgccggtggagccgctgcaaacagggaaaagatgatacaggcaagcacaatgatcgcaccttccaggcagacagcagcatagcttttgataaagctcttgccaacactctgacttggttcccctgcaaaagtggaaagagggatgggagcaatcgccgtatagagatacagtttaaaaaatctgccatagacagacataatcataatgaacgacagtatcgtaatgaacagaccgccgatcaatgtgactgcccagagggggatactctcaaaaaagccacagtcctcaacggctgtgacgatttcctgcggcagtaccgtttgtgtggcagagccaaatccagcggcattcatgatcgtggaaaccacaccctgaacgatattaaagagagccatcatcagctctaagccatatgtgacgactccttttgcaagggcaaaacgaataaacagcttcaaagcgtgttccggctttttgacttctgcaaaattgccgcaggtgcgcatgacaccaacgacaaaaaacagcaccagcagggcaagtccgattgcctgcagtgcgccgtgaatatccaggataacagaccatatcgtaccgcctttgaactgctccggtgactgggtaatgagctgccatatctcggctaacttttcattccaggtgttcagggcattttcaagattctgtacgacccagttatcagacatttgaccacctccttataaaatggacaatgagagcatttctgccgcagcagatctgctcccattgtcttgcttcgtccgttatcttagcctgtgatcagggtaaggatctcttttgcaaaggtaatgactacgccgcccgcaagagtcaggaatccattcgctctctgggacggatcatgagatttcagagaaaggccgatctgtacgataccaaagccgagcatgatcatacccacagccctgaccagtccgaaaataaagtcggagaggttattgactacggtaatgggatcgttagcggcaaatgccgtcgtggtaaaacaggtcatacaaagcacagcacctgcatacgccaccaaggctcttttggtctttctgctcatcggcagcttcacggtttctttcttctgggtatccttcttgctaaaaaatttcatagataaatcctcctttagatgttaaacatttcttccaaatcctcatcggacagaagttcataagttgtgttgacagatgcaatgcttacggcattctctggaatttcactgtcaaacacgagcgtagcgaccgcctgtgtcggctctccgtggatatacggcggctggccgccatccaccgtcagcttcacattcgggtgcttcagaatgtcgtacttcagatccataaccggacgctcccctcggataaacagcagtgcataacggttatccagcatacgcacctcatccggagtcatcagttcacgtcctgaaatctgatagttggtcgaatagtttccgctgcgcccggagctttttccatatgtgttcgtatcaatagtttccttccctaaaagctcggacacatatttgtgggtactctgttcgttgccgcccagatacaaaaattcatcatgaggtaaggttcagctcatcctttgcaggacttgcgtcccctccctcccaaaccgcacgtacacctctcgatgtatacggctttccgcttattatatttacggtattaagaatgaatcagtttatgacattcagggcataccacaagagttttccgtctccttttgcgcataaggagtacccactccgcattgccctttaagtcttttagtttctttacttgatggatttccagatttctgcaatcctttccacaaagttcacaggtatggcgttccactctctgtttcagagtgttggttttagcgtattttgagaattgcggaagttcactcacattgtcaaactttgtagctgattcttttcgcttaaacccatctctgtaaaaggtcgtggttttcctgcctgctctggtatcgtatgcgattgtaaacagacccccaacacaatatctgcgcttgatttcgtgaacatttgttttgtacttacaggcaaatgtcttgtacatactgtacttcataagattggcaaatctgcctatcttaaaggaatcatttgctatggcatagtagttgtaaagtccacgaacttccgcattatatcttgccagaatttctatatcgctttgatttaccagttttcccctgtgcagggctacaaatctttcttttccgttttcgttaatcttgattttgattgcatgatattccagtaacttccctacccatttttctctgggtacaagcagtttcaccacacctgcattgcttctgattttgtatcctcctgcggatttctttaaatcctgacttctggataccgtaatgtcatagcctaaaaatctggctctgtctcctgtatgcgtaaccttcgttttggtttcggacatttccaaatccagttcttccctaagaaatctgccgacgtcagctttcatctgttctgcgtccgctttgctcccgattactccgataatgaaatcatcagcataacgggtgtactgaatccgtttatatgtctcatccaaaggtttggtaggagttaattgtcttgcttgcttttcaagcattttcaaatgcttattgcgttcctgacgttcttctggagataaatccgtccacttctttttgcccatacatctataataggatgcctttttgacaactttattgtagtcggagttcatttgtttcttctttccccggttatatttctgtgcatattcctccataaatttatctaattcgtgaaggtacacgtttgcaagcactggactgacacctgaaccctgcggtactccgctgtatgtccgattgtacgtccattgctccatatagcctgcttttagaaatttccagatgagttgtagaaacatttcatcatcaatacgttttctcagcaatctgatgattgtgtggtgattaaaactgtcaaagcaggcgtgtatatcgccctcaacaaaccagttcgttcccgtaaaggttttctgaatctggtataatgcggtctgacagcttttgtttggtctgaacccatgagatgttttcttaaacacaggctcataaatgctttctaaaatcattttcactacttcctgcaccagtttgtcattgcccgactggattcccaacggacgctttttattactgtttttcttagcaatatattccctacgtgcaggttttggcaggtaacttttatctcgcatggattcaataatcctttggattctttcgttactcatgccatcaatggtagttccatctgcaccggcagtcatactgcctgtgtttgcatatatgtttttatatgcaagccaatagaactctgggttgtacagattccgatataatctctgaaacctgtaagattcattctttgacttttccgtcaaactacttaatacttggattggatttctcaatgcctctcgcaccgtcctttcatatcgtattagtaaataagctgctcccctttgccatgtgaacgtcattaacgtctcagactactatgggagctgtgtgaccatgcccgttaccgggtttaggtcatccccagttagtatttatggaattagcgtttcgtgttgtcggcaccgactttcgccatttacccgctgtcttgcggttgtccttccatgagtatcgcttgctttcataactgcgaaatgaaaccaacatggaatagcatacgtttcaatccttttcgtatgcggagtgcggattcccccactctggctatcgttcaggcagtttagttttgtacctcatacacgaatttttattcttgaattttcagatacacaggattagtaccttatcattcaggcttttatccattgacaaaagcgacaacatgctacactccccttcgggtttcccctctcggataagttgtagaataataggctgtgatttttcatcacttgatacttttacctactgcttgctaaaggcagtattccataaataccacgccgccgaatttataatgcgctggcgacttctgggcgcacacagttgcccacaatgctttcccactgcttttcaaaaagcgctttcagctgcgccagattctgaagaatgatgctgacggatacaccacgggagcgcatcacggacaaaattttatcgaagtcatcgggcaatgaaacattggcaaactcgtccatgatgaaatggcagtggacaggcaggctgccgccatacttatggtcggcaagataaaagagctgctggaaaagctgcgtataaaggatactgacaagaaagttaaaactcgtatcgttgtctggtatcagagcgaacaaagcgactttcttttcccctaaactgggcagatcaagctcatccgtagctgtcaaaccggcaaggctctccagattgaatttttcaagccttgcggcaagggtgatctggatgctctttaaggtcttggcagaaccagagtgataatccctgtaatacttcagggcgatatgctccgggttatccaattccaaccggtcaaacagttcgtccagaggactgacatagctatcgtcatcctcccggacttcaccagcccgtaaaagctccatgaccattgggaagttctgttcatcaggcggcgcttcgtatttcagataaaacaccagtgccagaagcagcatactggccgctgtatcccagaaggggtcttgcgactgtgcgcctttgggcgtggttgccttaaaaagattggtcaccagcctttgcacatcgttgtcattcctaagataaacaaagggattgtaacaatggcttcggttcatattgatcagatcaaggactcgcacttcatagcctttcttttccaacagaccgccaatgtcacggacaatttctcctttcggatcgaggatcacgaaagaggtattgcactgcatggcattaggcttacagaaaaaccttgtttttcctgcgccggaaccgccgcatactaaaatgttcagattcctgcggtgttttctgccatccagaccaatacggacattctgcgtcagcagcttatttgcggacggatctttatcccggtactttttattcaaagtcccggtgttgccccattttgccgagccatgctcctcccgcctgcggtagttcctgcgggtagagaaataaatgccgattcccattgcataagcgagcaaaaaaagaaggacagtttttaagctgtcctcacacatcctgattgcaaaagggtggcgcatcgccacgggtaatccgttgacgatctctaccatgcctccactgacatagggcgctgtcagcagggcaaaccatacgacaggaacaatcccgcagacagaaaggatgatgctcgttttctggctgttatcgttcctcatgacacttacagggaagcaccctgactttctttgtcggtgcattggctaccttgtcaatcagctcatccacaggctcggtggggcgttcctcctgtatctgccgtgtccgcaaggtatttaaggcattgatcacgatatttctgtcgtacttatccagtgcgatatggtatcgttcttctttcataggctctacctccgattagcgttcctgctccttgttcttaggcggtctgttcttttccagactcttaaacatgtcgctctggatttctcccagaacatcgcgcatggagttaagctcgcctttgaacacctgcgtatccatttccgaaaattcacctggaagccggtcgaaactgaaccctctggtatctacgccataacgttcactgaccatataggcgacacagaaagatttgaaatcggaagcatcacggctttcattgtgtttgaagtcaaagaccgccgcagaaacttcctttgccatgctcacaaaaagctgttcttcggaaaggccggtcttaataaaaatcgtctgctgcttactgtcgtagtaggcaggcatttccagatcgtcaaccgggacaaagggaaccgggcttgcatcgatcagggcagaaacaagctcccgcatggttttcgtctcgggtgcctgcacttttcctgccgcagaggtttcagaaatgtcatagacaatcttcgcattatagccgactgcctttgaaccgtcctcacggatatattccttccccggttcaagaatgacgatcttgtgtgcatccttgttgacatagatccgattctgcttccatgcgctgtaatctttcagctgcactgcatcgggtttctgggcagataccaaaatggcattggcaactgaataacggtcaaaacggctctgcacatccagatactgctggaaacaatttccgctggtcatcattttggtacaggtactgtcgatcaactcataagcttcctttcgctgttcctgcttctgggcagcccactccgctttatcaaacggtttactgccgccgctaaatacatcataaatactcattatcatttacctcgtttctttggatttgggtttctttttccgccttggcggttgtttatgctctgtttttcctgctggcggtttcttggctttgtcggaagcagtgcttctgtccagggaaggggaagcctccgcttcctgctccttacggctctctttgattttccgcagttcctctctgacagaaggtttttccttagtcatagtagccccctctgcggacttctttggctgctctaagataggctcggactgaggggatttttcggtctttgccacagaggggttttccggggcatgttcctccttctgaaccggcgcacccatcagtgcgtcaagaagtttatctttctctgccttttcctgtactccgatgtctggccccggctggccgtccttcgtatctttggacttttctgtttccgtcacaatagacgccgtgctttcggatgccagtttgaagcgctccgcaatacggctgatcttagatgcatcctccgcacgggcgatcacatccacctcggcattgggatctttgttttttcggtcagcaagcacacagtagagaacaccgtatttcttggcttcctgtgtgaatttcttcaaatcaccatttttgacggtaaagactttcagttcctttccagagcgcagcatgttggtgagccttgccttgcctttggttttcttttcttctttgagaatcgaatacaagaggatcgcaatgtttttcgcaccagcaccggtaatcctggcggcgacttcaaatccctccaagctcattcggacgatctgttctgccgcttcgccgcttgtgttcatttgtcatcagctcctttctttgctgttcttcatctgcccgtatggttttcagcttttccttgagggtatcgttacgggcctcaattccctcgcacagtttcacctcctttcggatcactcgcaatcgtttggaaagatcggaaagctgtgaccgtatcgcttccttttcttcactgcccatcttacgggattgggaataaagccccttgcgcttttgaagcaggtcagccatttccgtttccaaagattccttataagaacaaagctgctctaccgtatcaatgcgattccggcaaagcagccttgtttcctgcgatataacttccatcttcatcaggtcatccttcaaaagataatgaagccttgcataattctgttttctgtttttcggaagaataccgagcctgtagcagtaatgcagatacagcccccgcagcccgccgattttctttgctccattcagagtgcctttcaggcggtacaccgggattggcttttgcggcccggcaaaccgggaaaacttcactgcataggaattctcccggatgcgctccatgatcctctcgttagtataattttctcccagcttgtaaagccgcttggggcgcttccatcctttacccatgatcgtccagtattttcggttcgggtcaaatcggacttggtatcccatttccgccatctgacggtcaaagtctttcagagtaaaagacttgctgatcgcttcatccactgcctgccttgccacgttgtcccgtgtaggcatcccattcttttccgcctgataaagtgcatagggtttctttctgccgcttggatgttctatgaccgaaagggcatattcccggcacagttcatcggaacgctggcgaagcaatcgaagattggctttgttgtcgtggtaatgtttcccgtccataaaagaaaccgagttcacaacaaagtgattgtgcaggcagtccgtattcagatgggtagcaacgattacctgaaacctgtcgccccacatccgctgtgcaagtctgacaccgatttcatgtgcctgtttgggcgtgacctctcccgatttaaaactctggaacccgtgatagcagatgatctcactttcatcattccactgtactttggcgatcatcatttcctctctggcagaggcaggatcacagttgacacccgtgacaaaaaaccgctgctccgtcttatcctgattggtcgcatattccatcacatcaaccaaagcctgaaggtctgtttccgaataattgggattggcagtcttttccgggttttcggcatagtcaatcgggtggtcaagcctgccccgtacatcccagatctcacagactgccattatcccgatggcctttggggaagcagatatttttttcggacatccacctgaaactcatgccacttctttgcttcctgtgaaagcatgggggcgtctacaaatcccagggcattggcttttgcggcaagctggttgatacggttgccgatggcagacagttcccgcatgatcttataaaattcaggatcgggcttttcacaaagacggtagcccttgaccatttcccgcaggaatgcttctttggagcggccggatctttttacaagctcatagagatgctgtgcttcttcctcattcagacgaaacaggatctgtacgcttcggtttctcatttcccacatcctttctggcgtagagccgattgatctgcaggcagcacatcagtacaacgccgaaaatcccgcccagggtaaacgcaataaattcactcattcttaaactcctttcttctgccggggtattaggggctaccccctaacaagcgaatttggcatccagaagattctggataaccaaattcagtgcttggtaagacatcactcctcgcactcgtcctcatacacacattctccgcaaacggaacagaagtacgggcagcccgaacagcagtcgtcctcatccgtttcttcctcgaccgattcttcaagaccgtcctcccggtctacggtgacgacagcttcaccgccaatgaaatcctcatccgaaaagtcgatcaggtcagtgtcaaacaggatggtttctgtcttttcttttacctgttccggggtttccgcatatacggaaatggtcttttgatagtgtccagtcagagtaaccttaaattttttcaataaaatttcctcgctttctttgttcattttgatttggataccgtggtgtttcttgacaaaaatcaatgggcaatcaacgggcatccctcctttcatggctccgatttggtcttgcaattcctaaataggacaataaaaaatcgttgaaatccttaccgacaggcggtggatcatcaacgatctggtagtctttctgcaacaactcttttaaggcggcagtacagatcctgcctgttttgtcattgtccaaatgcagaaagatggtctttacttgtggatttgccttcaaaaaagtggtgagggcaacagggatcttgctgtcctttatctctttctttggctgatacacacccgaaagagaaagcagattttcttttttatagtccttaccttcacatttaagcagagtagcgtaagataataaatcaatggctgcttcaaacagatgcaccgactggcaagactctcttgccagaaggcggaaggaataccgcttgtcacttcccgatgcatcgcccttaaaggagctggccatcgtaccacgataggcagcatacttaggggttccgctttcatctttgccgataaaaacaacattgtgatacctggcactttcataaatcgtaccgtctgcaatgcactcctgaatgatttgaaaatcaatgccacgtccgaaaagatactgggtcacccggtcacagtctttatttctgggcggcagaagaagctctttgggttcatcctttggcacagaaacaggtggtggactccagcctgcggtaatacctgccaaagcttccacggcttctacaaagctgtattccttgactttgatcagatagtccagggcagaaacaccgccaaaacctcttgaccaccagtaccatttgccattggaaatcttcagactgtcgtgttctctggtgcagtaaacatttctcgccacatgcttcagattgtctggttcatacctctgcaagtaggaaagcaagtccatctgccgtgcctgctcaatcacagcagggtcaagctgcacatagggtctgttacttctcattcaatacaatcacctcctgaaatagaaaaagccgagggattttcataatgaaaacctctcggctatgtaaaatcataggatttgtcattattaataagggtttcttttttcagtaccctaggaatccttgctgaaaaatcaagctggataacaggtagtgaaaactctttttctaatgctatataattcttcttatgattaattcctgtgtaatctgcaaagcaattccgttgattgttgataccccaaaagttcctaataattctggctcatagttaagatcatttccatattcatctacgaactttctgtatccaatcctataaaagccataattactaatatccatcatttcctccaaccgatcaatattaaaaaaataacctcttgtccaatattctttacctacaatttgagggggaataaacaaatctttctcttttattcctttttttacacagtcttttatgtcagttttattatgaaaaatcagaattactaataaatcatcaccgttaagattgttaacatgtgtatttacaactagaccgttaaaaaaaatattttctctcggattcacttggaatatatctccaactgacggatactttcgttttctttttataatttgcaactgataatctgatttttcaaaagtatctaatttctcttttacgtcaattggaagattcttacaccgtgctttccagcgattagcaataatattattggttaggtcatctattatcatatcaagacctcctatattatttttattatacaatatcccgacatttaattctatctgataatttctatatctctttataacaagaaataagatttcctgctctatgtggattagcgatatcaacctaacgccataatatacaagtaagtaaaaaagcccagctcccgtgcctgctcgatcacggcaggatcaagctgcacatagggtctgttacttttcattcaatacaatcacctcctgaaatagaaaaagccgagggattttcgtaatgaaaacctctcggctatgtaaaatcatatttaattattggagatttgtcgctctgatcaacttctcaataaataaattagaaattggcaatttaagtttcgtccaaatatatttctactttgatgtattctttattttttgcataggcaaaaacttctgattttctaatgtagtcaaatatattttcacttaaatcttcgtcccatgttgcttcactaaatattttattttcactggtaggcttatataaaatgtttacatggatttggtaaaattcttcatcatcatttggaaattgtctaactaacgaaatttcaaacacttgttcgggtccaaaagtagtaaatgttccagtttcaaataaaatcatatcttctttgagtggtatactgcacatctgctcaaatacatttacaatttcttccagtggcattttatcagtaattttatctttcaagaatttaattaaactgtccattgattttcctcctccaaattccgatttataattttatattttatcacacttttataattttttctatcccacacctatgtaaaagcggcatcagctatacaccaatgccgcctttgtcggttataaaattcctgcttttttcagatacccaacgccatcataacagccacggaagtaaaccgtctgcatttcaatatctgtaagattgtttctaagctccataaccttgatcagagccgcacattcctgctgggataattccgctgcggtttcggtatcaacagcctccagcactttgggatattgttgaaatatcgctttcatctgttcctgaatggcacggtagtcctcattgctttccggcagtcttgcaatcacggagcttagatattcacgaaagatattgctgtgggcatctacaaaggtttcaaatctgaactcgtcagacaccgctctcacctccgatagtttcaattctacacttattatactgcccatatttatgcaatacaaatgtgcaaaaagggaatttatctctcccggcttgcgcattttctttcgggcggttcctcactttgctccggctctgcatcaagtgcagcgggatctttctggtctaaattaagctgcacataggatcggttacttctcattcaataaaatagaaaaagccgagggattttccattaagaaaacctctcggctatgtaaaagcatactcaattatatatttgcaagtcagcgataaactgggatttgattatctctttcgtttttcaacacatattgattttgtgccgtcatctaactcaaagttattactatcaactcgtatataacaacttccagtcttagaatgaagaaaaggaattatatctttgtcgtaattacaaatggtattgattgcaaagatatgatgattattagaattagccatatattcatcatcttcgttacctgccaaaaatctccaaccactatcagggttctgttcatccggttgctccctatacatatacccaaccttaaatccctcttttgttattctatcagataccacacaaccatttccgttaggctcattccattcaattaaatcttcaatctttattttaataaaatcgctttttttcttattgaacaaacccatatttacatctccaatttttttgacaacttccaatttatatctctgattatatcacatccacatcggttattccatatggcagttacaaaacatctatgagtaggatataaaacttcctactctatgtaaaagcggcatcagcttcacaccaacgccgcaatgggttatagaatacttagctttttaaggtagctgacgcaatcaatacagcctttgaaataaacctctttcagctctaagtttgctatttcgtttttgcatttcagcacttcattcaaagcgttacattcttccgcagacagctcgcaggggctatctacatcaaggactttccgcacattaggatattgtttatagagcgtttttatcttttccgacagctctttatacctcgtttcggaatgacaacctgtgtttgttttactgagataatcgaaaaagtcagtatcgtattcatcaaaaatatacctctcaaaaaagagcttcacaaatgtggaaatctgattatctctcccggcttgcgcattttctttcgggcggttcctcactttgctccggctctgcatcaagcacagcgggatctttctgatctaaattcagctcgatgttgagggcattgagccgttctgatttctctttcagttcatcttcaaagccaaacggcttttccacctcaatcttagcggtttcaagctgttccatcgtttctgcttttttgatttttgcggcttccagttttgcaggaattttcgcaagctcattttcaattcgggtcaggttacccagtggatcagtacctaaatctactttgtgctttgcctttccgcaaagatataaacagtaatgggcattgaaggtatcatagaaaacttccagtttgaacccacgatagcttccgatttccgcaggctcagccatcggatattctttacagaccgcaagaagcatctcgcctgcggctgctttttccgtataagtgattccttttaaggtcatcggacagaacttttcttcgccctgcggctgatgctgccgggcaagggaagcatcggcttcatagcagacaatccgctgttcacactccttaatggtctgcgggaaatatttcagtatcctgtcctcaaggtcgtaatgctcggatagatagctttgtttcagcactttgagcttggaaacctgaatgtctaagtccattttttccttgaaacgctcgtcccctgtggcaagcattttgacttccgcaaaggaaagggccacctcatccacatcttccgcagaacggacaggacttttgctggtcatgatctgggagataaatttctgcttcgattccaccagctgatagagataggcatcaaaggtctgctccgtcacataacggtaaacctgaacttccgagaacctgtttccctggcgctcaatacgtccctggcgctgttccagatcggatggccgccacgggcaatccagattatgaatggcaatgagtctgtcctgtacattggtacctgcgcccatcttaggggttgaacccagcagaacacggacttcgccgcttctgacctttgcaaacagttcctttttctgtgcgtcactggtagcttcatggataaaccgtatctgttcggcagggataccacgggcgatcagcttttcccggatgtcatcatagacattaaaagtcccgtcatttttcggggtagacaggtcgcagaacaccagctgggttgctttcgtatccgcatattcttcccagatacgatacacgttgtccacacaggcattcaccttgctgtttggatcatccggcagcatggggtcgatcatcctctggtcaagggcaagttttcgcccatcgttggtaatcttgagcatgttgtccacattcggctccacaagccttgcacggactttttctgctcgtttggcaagagaagcgaccagttccgtctggatttcacttggcttggtcttgatgttgtggtactcgaccgccggaacagggagtttcagcatatcggcagtctgaatatccgccacctcccggaacatcagcatcagctccggcaggttgaaaaacttggcaaagcgggttttcgcccggtaattggttccctccggagccagctccagagcggtgactgtctcaccaaaggtggatgcccagctgtcaaaatgctgcaaaccattccgtaaaagcgcatcatactgcaggtagcgctgtaccgaatacagctccaccatggagttgctgatcggggttcccgtggcaaagatcgttccccggttgcctgtgatttcatccagatagcggcacttcataaaaaggtcgctggatttctgggcttccgtctgggcgatcccgcctacatttcgcatcttggtataaagatacaggttcttataaaaatggctctcatcaataaagagcctgtcgatgccgagctgttcaaaatcaatgacggtatcctttcgcttggtgtcattgagcttatccagttttgcctgaatcgcctttctggttttcatcagctgcttgaccgtgaactgttcgcctttgcttgccttcacatcgtcaatcccacgctcaatgtcatcgagctggcgctgaagctgttctctctgtcgctcaatactcatagggattttctcaaactgactatgcccgataatgaccgcatcgtaatcgccggtggcaatgcgggaacagaactttttccggttgcccgtttcaaaatcctgcctgcgggttacaaggatattggcacttgggtacagcctaagatactcggaagcccattgccccacaagatgattggggacaacgaacatcgacttattgcataatccaaggcgcttgctttcctgtgccgcagcaaccatttcaaaagtttttcctgcgcccaccttgtgggcaaggagtgtgttgccgccatacaggatatgggcaatggcattgacctgatggggccggagtgtgatctctgggctgataccgccaaatacgatatggcttccgtcatactcacgggggcggacggaattgaacgtgtcgttgtaataccgcaccagtcggctcctgcgtgtcgggtctttccagatccaatcctgaaatgcctgtttgattgcttcctgctttgcctgcgctgccgtggtttctttggcattgaatacggcttttttatttccgttttcatcatatacataatcaaaaatacgggtatcacgcaggtttaaggtgtcctcaataatacgataggcggaagccctttttgtaccataggtgctgtccgccttgacatttccgaaatcggaactcttattttcaataaaccagtcgccattcattggggtgtagcgcactcggattcttcctgccgcatagctggaaggggtcagaagctccatgacaaaccgctgaatatcctcctgcggtatccaggttgtacccagacggacggagatttctgccgctgacaggtctttggggatcacctgctttaaggcttctacattgatttcatacgccggatcttcctttgccgcagcctgtgcgcttagaagttttgtccgcacattgccggacagatattcgtcagcagtcacatattttgccggttccaaagcagggatacgaaagatcacgccctgcaattcctgtaccagctcctcctggggtttccctgtaagctgctccatataaggcaggtcaacgagagccttttccccaatagaaagggcaagggcttcgctggctgtttccacagaagtaacttcccgatggggcttgatcgtccgcttcgtgaacatatctgcttttcgtttgaaattgccctcatcatccagcacttccaaagagcataacaggaagtagctctcatccgatgcaaaggccagatagttgccacggctgttgatcagcccgtatttttgggaaaacgcatcatacagccggttcagattttcctgttcggtgcgtatcatttcttctggataatcctccgtctgatactcgatgagctttctgacacagtcacggatctcgatcaatcccttgatgcggctctctgcggtcatagatactgcagccggggtcatgcggtcattttcccggaagtagacttttccatccaccaaggtaaaggaaaaattgcgcacattcggatcggcaggaacagaagcgtccggttcatccgagatttcatcgatccctttttcatactccgggatttctccctgaatgttctggacagctttgcttaacagatccgcaagtggaatgtctttgtatgccttgcaggcagagtcaaaaccaaagcgggtactttccattttcatttcgcccagaatcatttccgggtgctgtacaaaatagctgttcatcgtgatcccgttctcatcggtatccaggtgtacccaatccggttccacatctgcaatgcggtcacgcttctgcaaaaagaggatgtcactggtgacctctgtccctgcattggcacgaaacgtattgtccggcaggcggatggctcctaaaagttccgccctctgtgcgatatatttccgcacctccgggcttgttttgtccatcgttcccttggaagtaataaaggccactacgccgccgctgcggactttatccaatgctttcgcaaagaaataatcgtggatcaggaatttctgggcgttgtaacggctgtcattgaccttaaaatcgccaaacggtacatttcccacaatgacatcaaagtggtcatcgggaagttttgtctgctcaaatccctcaatggcaatgctggctttctggtaaagctgctttgcaattcttcccgtaagagagtcgatttctacaccgtgaagcgttgagcctgccatacgatcggggatcaggccaaagaagttgccggtaccgcaggacggctccagaatcgtaccgccggaaaatcccatatggtcaagggcttcgtgcatggctttgatgacaaccggcggggtatagaacgctgtcagagtagactccatggctgcccggtattcttccggggagaggctggcgttcagctccttaaattcttgcgcccaggcagcattgttctcgtcaaaggccatggatagaccgccccagccaacataacgggcaagaacttcctgttcttcgggggtagcaagacgatgttccagttccagctcatggagcagctggatggctgccatgttgtttctgaatttttcttttgcgccgccgacacctaaagtatcttctgtaatccgataattgtgtcggtcagaagaaggaacaactgctttttctgtcttttcttcgggctgtgattcaagcggtttcaatcgttcaacctgttcttctgcctttgctactaagtctccaaattccagatcagaaagacagcgttcaatcatatccgaaagaccgttgaacctttctcgatgagtcaggctgctgtcgatataaatatccagtgtacaatccaccagatccgcattgatctgaagatcatactcctcattctcggaagtagtataggcaagccctacgctgtgcaaatcctcataatctgcccctaattcgctgtcgtattcttcatggataaattcatcgatcagggctttcgcctgttccagtagttcctcctgtggctgttgctgttccaaaatcctgcggatataactgttcttttccacacgattgatcgggaaaccaacatggttctggaacgtgatgtcacgcatagacacatcaccgctgatttctcccacgctttcaatccgatatctgcggttgtcgatcacgatttccttaccgatcaggtcggaagaaccctgtgaaacttcagattgttctttttcttcctgtccggcagtgggctgcaattcagcaatgagctgtctgcagatctctttttgttcttcatcctccaattcttcctgccactgcgtcagctgttccacataactttgcacatgcgccggatcagctaaatctgcctcgattttctgaatggtatcctctttggtttctccaacttccaaagcgtcctgatactcatatggatcaacttcttcaatgaagtccaccaaacgcccggcaaggcttgtgttcttatcctccgggacacggaaccagtcattttcggttgccatgatttccgcaaagagcttctcgtcctctagcgtcagcgtcttatgctgttccagatagggaaggaatacatctcgtccccattgcaggctctctagtttctcacgatagaaatcctctccctgtttcttccattcaggaataaatgggcagttgggggaaagggagtattcatagaagtttttgatatgggcaatcagatcgccctcgccatctccaatgtcaaagcgtccctcatagtgaaaatcctcgccgccgatagtggccgtaatctcaaaatcggtcttgtgataccatccaacatgattttcttccgcctgtctttcccggtgctgcttctcgtctaaaacacccagaagataattgccaagggcaaagctcaggtcggtgtatcgatccttcagttcccggtcataaaaggcggggtgttccgaaaagccgatagaaaataccagacggtcaggctttgtttcggcaggtgtttccttgccctgcatttctgtgatgatgaccttgaggtggtcattggcaggattttcacggagcttttcttcaaaatccgtccggctcatttcttttccaaacaggggaaattcaggattttgaagggatacagcagtttcatcaaaggcagatacttcatatttatctgctcccagatacaccatatctccctcgtgatagaggtagcggacagggtgaagctccagaagttcctgggaaaagcgccatgcattgctccggctgtaaacgctgacggtctgcctctgcactttcgtcagaaaatcaagcatctgctggacagtggcaggctctgaaaggagctgctccatctgttcggcagaaacatcggcaagatcggcaagatccaattctttaagcagatccttttcgtaatgatccagatcacggataaaatcagacagccgcaaagaaagggtatctctcttatcggcaggcggaaggtcacggtgagcatcaataaaacgctgccttgccattttccgctgtgcatcaatttcatactggggagcttccacactttccagatattcaggatagtgatctttttccttggcgttgaaataacggtcattttgaatcagttccccgatccgtttttctaccttagaccacgaaagtacaaggtcgggctttgtataggaaccatgcttttcaattccgatccctttactgtcatgccatgtcccgccctgtgtcccatcgggataactgtgcgtaccgccgccggtgccgtactcatttttaagaaaggcaatgttggctttcttatcctcatacttctgaaattgacggtagatgcggtacttgccattttcaaagccgcttcctcttaccaggacagagtcaatatcttcctgtgaaacagaaaaagcagaggatttttcgtcctctgcttctgcaatctgttcgatttgttcctctacggtaggaagattggctgtgacctcttcttcattggctgtgcttagcggtagatcagctcgttcaggatcagctcctccgcctgactgcgaatgttgttcatcattcccacccactgcatcggggctttctctttcagttcctccgtcacgccctgctcggctgacagctgcttcgtcagaagttccagcctctggagcgctgtctgttccgtctggtacagatgctcgttcagcctgccctgtgtcagaaggttgagataggtcactctcttgtgctgctccagataatcccggtgcatcaatgcgtatctgccaagcggaagttctggctctgtcggtaatgtcaggtcgggaataagataatccccctgacgggtatatgtgatgttctccatgatgatcgctcctttcgggttgttttctgcttctatcatacgaagattgtgtttcctgcgcaaaggtgcgggactgtgttttttctgccacctgcacatcccggatcgtttgtgagatttcccggagtgccatttccgcaatgtcacttgttgcaatgccaagggcgttaatagtggcaggggtattaaagttcacaatgtcctgaaaatcctcacggtcaaagtattcgcccgtatccagaccgcagcggctgaccagcataaatgccacactgtttacggccagccgctggtacatgacctcaatattcaggtcgtccagttcctctaagaaactgtccgccgtcacatctttgagctgtgcaagatagtcctgcagatgatcttccacggcatttttcgctgtttccatcagggcagaagcaagatcggtactttccagttctccaaacctgtcagaaagccgttccatcacaggctgctcgtatcgggtttccatctgccatatcggaacaggacggctgccgtaataaccttcgtgtgtgtctgacacatcaaagtaatatttcagggtattcctgcggcctttggggtcaaataccgcaatccctttgctgtctttatttacccagcgccggaactgtttgttccaggtttcaagctgtgccacggcaaccgcatccgggcgctgggcaaagattaagagctgttcgtcaaagcggcatttgtaattccggcagacagcggcaagaaagttctgccatgtctgcgggttcttggctaccgcaatttctgtacgccgatacagctcggtaatcagctgatactttgcagccatttcatttccacctccttattgattttcaggattattccttgtcctctccgtcaaaaaagaaatcaccctgtttgcttttatacttttctgcaattcattgatgagcgcaatctccgctacagtaatgccttggatagagagaatatcatccatcgtcatggcggagattgctttttcatcggtaaaaccagcatccagaatcttattgatgactttgaccgctttctggttgatcgccattatctatcctccttatcgttcatattctttatgcctgacggttttatgtggtggttcctggggtttgggttcataagtgtggccgtttctttccatacgctcggcaaattcacaaatgtgatagatatttccgccgatctctgtatggtattcatcaataaagcggcaggaacgttccgcagtttcgccccatgataaatgaagaataattttcccgccgtcaggaatacgaaacaattctttgtaatgcggatcaataaaccgaatcccttgtgctgctttctccatatgtctgtccagccattctttcacataacagtaacaatagaagttatagtcaccctttgtcggattgcaccggaataaaaaggcatatttctccgtgtccatccgaaacccatattctgtgcagtaatttccctgtaaagcactggaaggatagctctttgcgaaagccttcatatcatatcggttatgcaataatccgtgattttcccgcagggtattcactacttcatcaagctcattcttaaattcttctgatttccattgcggtctggtatcaaaccatgtggtatagaaaccatatccagagtcagcaaaatcgccccgcaaatggccaatattgccggtctgtccgctgatttgagaactctgtgaatacacataattttgttcagccgcagttaatggtctgatttccatatcaacgttcctcccggctgtgtttcgctttttgctctttctggatggttttcaaggcatccttggcccattggggcatacgctccggcttgatctcacccaggacatcatatcgttcccatcggctatgttcgccggtggcaaggcaggtgccaaagactgcctgacctctgccgccggtggcaccgtttcctccttccgcaagtacaagctggtaagcagcgtgctgatattcatatcgcttcggctctgcattgattacaaccaccttgcccacaatgcttttattcctcatgtcagggatacagtcagcgactgtaaagggggtagggtcaaacttgaatttttcctgttcggcccgtgtctgttcgatctgtgtctgcacacgatcacaaaaaagctgcatggcttccagataatcctctgttcctacggcttctgttggccatggtgcggaaaacggattattgtaatcgcagtagcagactacataaggatgttccgcccgcttatcgacacagaaaacaacttctttctttccgatgtggatactctgttccacagtatagttgccgatcatccttttctcgtcattcatcagcatcatcctttctttgctttttcctgttctgctcgtctaagatctttcggatacagacatcgcagaaaatcattgacctgtccttatatcggggataggggcaggtcgtacagtcatatttcttctttttaccgttcacggtcatcaccgcttttctgctttcttcattcataggcagacctcacgattctttcgcatagctgcgataatctttttctcctttggcacggacacggcgcacatggctgctccccgcaagctccgggtgctttgcctgaagttttctccgtatcctgcatacgctctcaaaactcggtaagccaagatatttgtactgggtcatgacctcagccagaggcatcgccccggcatctttcagataggcattgcacaccttcaggtagagcagcatatcatcatccctggtttcctcgtcttttttcaggatggctttaatcttgccctccatggttttcagattttccattggatacctccataaaggaaaggggcggcatgttttgccgcccctccacgatcacttcttatttctgtggcggatgttcagccagatggctccgcctgcaatgaacacaacaagtgcgattgcaaggattgtttttacctccatgctttaatcctcctttttctttttattcttaaagccaacaaaacctaagacaccagcaccaagcatggaaaccgccgccagcccgatccagagagcaggattgaagtcatcccctgttttcggtgtttctctcagttcgttgtgcatttctacggtagctgtttcatccaccttgatggttacctgcttatcggcaggcaggatatatccagaagaaacactgtcgctgacctcagataccgtgtattcgccaattcgcagaccttcgataaagatctcaccgtttttatcggtcttaaaggtctggtcatatccgtttgttcctgtcacacggaaggagaagccttctacctttttgtcagaagaagtttttacgatcttcaaagagcctttctgcgctccattgataaatccaacacctgcttcgttttcaaccgtatagacctttccatcttcctcaatggacaccggataaacattctcatccagcaggaatccttccggcgctgtcttttcacggacaagatattttccatagcgaaggttgctcatctggtaaacaccatcgcccagttctcccatttctcccagcagttcatcgccgtcatccagttttccgtcaccgtttttatctgcataaacttcaaaaacagcaccggtcagcttattgtcaggataatcttcatccacctttgtcagctcgatgctgccggtaataaacgcattgaccagttcaatttccacaacctcgtctaccttgctgatggttacaggaatttcttcatcggagagtacataacccgttgggctttcaatctcacggatgatccagtttccatatggcactttggcaaaagaaaaactaccgtcatcttccgatgtggtagttgcaatcgctgtttcggttgtaaattcctcggtaccggtcttaaagataccgataagcgcaccgcctaaagcatttccatcctcatcggatttctttccactgacagatccatagatcagatcattttcaatggcttcgccctcattggcagtaatggaaacgacagcggtttcctgaccggcgtactcgaagacaaccgggtatttggtttcatttttcagataggccgcattggtattgatttcctgtacataatagctgcccatcggcaggtcgctgactgccttaccgtgtccattctcatcaagggtaatcacctcgatcagaccgtcagccggaatggtcgttccatcagcggcggtcagttcctcggctgcataaagcccaaaggaaacatcaaagatctcgccgttgtttccaacgccataatcctcatcgacttcaaggctcttggtcaggtcaatttcaactttctgcctttcgttgtagaagctggtggaagtttcggtcaccgctacttcctgaccggcatagataagctcaaccgagtgaatttcgtcattgagaaccatgccatacggagccgtgatttcctttacttcatatttgccaagatacagttccttgctggttgccgtcccgtctgcacctgtggtaatggtatccacaacctcgcccttagaagcccgaagagttccatccagcgtatagatgtcctcggctgcggtgatctcatataccgcaccttccagactgccgactgcaaaaacaggctgatacattcctccggcttccgtaacagagctgaacacttcaccggacttggaaacggtaatggttcctttctgcgctacgttttcccttaccacctcaatgacggtaatgccgctttcctcagaagaatcctcctgtaccacatcgaaatagacgggttcatagttcagaacatagccgtatggagcctgtacttcaaccagggaatatccggttccatactccagtgtctgcggagtgatcagttcgccgtctgccgtagtatagaacgtgtcaatggttgtgacttccgggtaagtgaaagtcatcgttaccagctcgccgttcgggtcatagatctggaaaccggcaccggcatacgggatggtgttgcctgtttcagcgtctttcttcacgatcttgatatagctttcaaagttggcattgttgatgagatagcggtaaatctgtccatccgaattgataaacacatcaaacggtttcatcagctcacggccttcccagccggatgtctgcttgaccgtatagatcccgtagggcaggtcttttgtctgggcaaaaccattctcgtcacaagtcagaagatcacgctcactgtctttggcgtcggcataactgtttgccgatttcaaatagacttcaaatactgcgccttcttcgggtgtttcaatctgggtttctccgtcatcggtgtgtttgatgatcgcaatctttcccttgattacctgttcattcacatcgttggcagtgctgttcagctctacggtataaagctccggctctgcccctacatgatggatggtttcatcgagcagatagccttccgatgggctgatctcacggatactccagtcattgccgcacacataatagtctgtggtaaactgtccgtttccgtctgtggtgtaagtgtcaatcagttcctcgcccttatagatgccataaactgcaccggcaagggaagcatccccctggggtgtcccggtttcagcgtctgtctttgtgacagttacattgaattttttgaggatgttggtaaagctgcgctctgtgaccttattccattccaccggagcggtctggcttgccggaaccacatagcggatggcggtatctacttcctcaaggacatacggggtattgccgctgatcaggatattttcaaattttgccacaccctcggcatcggtcacagcatacttatctaccggtaagccgcttaatgatgttccgtagaggtggaacgtcacgccctcaaccagactgtcctcagaagtttttacaacctcaaggcttcctcttttcagcgtattgttgaagttgactgtggtggtcttgccgccgatcagcgtgatggtctgggtttcctgcggctcatacttatcaatggactgttccgtaatggtgtaagtgccggggaacaatccctccacagtcagattgccgttttcgtctgtggtaacggttttgttgaacttctcgcccttgatcgtaaaggaaatacctgcaacgacgccatcttcagaagtctttttcagtgcgattgtaccggtaggtgtctccacattcagatatgcctttactgcatctgcattttccacaccggtcacaacatcctgcaggctgggatcaccataggcgatcagttttgcgctgctgctgaccgttggcacattgcttcttgtggcggtgatccttacagaaccgtcaaaggctgtttcggatgtgatcgtcagcttattgccggatttggacacacgcactttactgtcggatgtggcaaaggaatagtcagcaaggacaccattgttatccgtcagtgtcatagtgtatttcccgtcctgataggaaagctcttttgtgatgtcatccgcaccacccgacataaaactcggaatggtattgtgtttggacagcagagaaacgatctggttatacacctcagcagcaccgctgttgggataattggaaccaaagtgcaggctgtacgctttctggctggtctgctggtaagcccctgtggactcacggcatcccgtcacaaattcccagacaagggtctgtgtggcaagccatttttcatcatcacttcccgaaagatgactgcggtttccctgatagccatagagcagggcaagtcctactgcttttttctggctggaagaaagggcattccatgtctgggaagaatttttcttgagggtattgcctgttttcagcggtacacccggctgaatacagaacgcattatcaccgtctacatacatacggtacttgtaactgcctgttccgcctgcggtataaccgtcaaacactgcactggagttatagcgcatggcatttccattcctgtcataagtgaagtcaaaggaaatcgtgccaatatctcccgcagcaaatgctgttgtcgctggcagcacagagaaggttgtgaccgcagccatgacaagggccgcagcctttttgaataatttggggaatttcatacattacctcctactttttgtttgtgagtttctttactaaccgaaaaaagcagtctataacgattgccaattttttctttcggatagttttggtagtaattagggggtgaggtgtggagagggggaaagcgaaaatatggctatccacaccaacaggcagacctcgccctcgatgtgtggctatcgttcccggtctttgtttcgctgcaggtagcggttgtaaaattccagcgccttgacaacaaaatccgattccctgcctctgggaacgctcttgggaatgagcttggtgatccgttcatcacggaaagcaggtttttccctctggtttggcttttcttcctgcatgatcgactggataacctcatctgtgagttttccgtcctgcatgaactttttcattttgatagcctgtgcaagtgatggggtcgcatcgttatactgcatagcttccagaagggaatactgctgttcatcggacagataagagatttctaccgccgggcgaaaagcaatctgacgttcatctaccatctgcaaaatttcaggaacaagctcggtcaagcgaatatatcggaaaatctggtttttactttcaccaaccttttcggcaagttcatcactagattttcttccttgcaacttgtttcccactggggaacaagttaaatctgtgcgctgtccttgtcgattcattgcttccagacgcattttataggcaaaggctttctcacttggtaaaatagttgatctttgcagattggactccaccatcacaataatggcttcgtcacgggtcagttccttcacctcgcatttcagagtttcaagcccggcaatctcacatgcctttttgcgtcggtggccgctgataagctcataccgcccatcctctttcagccgaaccgttgccggggtcatcactccatttcgcttgatactctcaacaagctgttccatgtcctcgtccagtaaaactttgaacggatgatctggaaactcgtcaatctccgcaatcggaatgtcccttatcttgctcagtttggcttccgcacggctttcatccgtctggaaaaggtcatcgtatgcggtcagctcgattttgtgtccgttgcttctcgccaatttctgccacctcctttcctaattgttcataggcagcggctacctttccgcttttgtcataagcaaaaatgctctttccctctgcggtagcttctaccgcacggatagaatgagggatttcggtatcaaaaactttgatcctttgcccgtatgcacttttcaccgaagcggtaatttcttttgaaatgttggtgcggggcattaccattgtcatcaggataccgtctatccgcagtttgggattgatctgccgcttgaccatagaaaccgagcgaagcaacagctccagacctttcgctgaaagatagtggggctgtgttgggataaccacactgtcagctgccgccagagcattgatggtgatcatgccaagagagggcatacagtcaatcagtacatagtcgtaattctttttgacctcatttacataggttttcaagacacgctcacggctcatggcattgatcagcctgacttcaaagccagacagctcaatattagacggaagcagatccacgccctcatggtgatgcaggatgccttgtgaaacatcaaaggctttatcgtcaataatgctttgcatcatggtggaaagggttataggaatatcatctggtctgctgtaccccagggccatggttaagttagcctgtgcatccgcatcaatcagcagaactttctttccttgctttgccagactgacccccaggttgactgctgtggttgttttgcccacaccgcctttttgattggtcagagcaatcactttgcaatttgacataggtgcatcctcctttcttttagatttagccgctttgtcagggcggctatgtaaagttccccagaacgcaaaaaagccgactggtttttataccaatcggctatgtaataattctccatattcagttcttaacctttgcagcaaacagctcccgtatgttatctgtatcccactgatctggaaacagcaccgccataatccgaaaagcatcgtagagtcctgctatatatgcgtgggtggcatattcacaatcttctttgtcccggcactccaataggtggttgcagacttcccgttgttcctttgttaaatccaaccggagatactccatttccgcaattccttcgttttcagagtctttctgataagtcatatctgcttccaatagtgaacggattgtttgctcccgtagtgtttcaacagctactttgaataattcttttaggtctatttcattcatcctgccctcccacataaactgtttttatttttttgagaggagcattgattaccttaaaaatcagttcatcgacacaatctgtatatcggccttgttggatcaacagatttttcaattctacaaggctttgaagtaaaagacttctatcgtggctatccacataaacatgaaatgttttttctctcatacgatgcacctccttacagcatcattatacgagaagcgctgtacccactcaaatatgccagcaaaaggacggaataaacttcaaaaaaaagccttttactcggtaacattcgcccatccaattagcaaggctttttgcatgatttttcggcaaattagcaggagaggcaatttgattagcaaaaatcgagaattttctgctaatcattagcaagctaatcggtgacaaaaatcaatcgttcgagttaagcaaggttgcttccgattagcaaaaatgcttcctgctaatcgctgtttgctatttgttctattttcctcggaaaatagaaaacgccgaaaaccttgaaaaatcaacgttttcggcggagtttttggcgtcgctaagaggatttgaacctccgacctaccgcttaggaggcggtcgctctatccagctgagctatagcgacatctagaaaatctatatttaattttacttgttacctgttccctttgcctccaaggtgtatgtttcaacactttcttaggaggcacttgttatatccatttaactaagggaacatgtactattttgtttatttactcaggagagcaccttagtgccctcctattatacttcaaactggtatcaattgtcaattacttaaaattaatccttccctgcatccatatatttcctttgaatcttctccccactgcaggctctcctactacgtcctttacaggcacgcatacgtcaaaagtcagttcattgacctccagcttcatgatatacagttcctcttttgtatactcattttccatctgctggaattcaagaatctctcccatgatagaataacagtcgcattccaccccatagggcatgatatatgtatccacaatactgaatacatcttcgcttatcagccttcttgatacttctgagtatgtatcaatatcatcgagagtcaggctttcaattgccacgggatcgccgcttttggccgcgcttaagagcatcatcctgttatgcgtctcctcctgctgtctcttttcctgctccttatcctttgatacagggaacaagactgttcccccattacaaaggcctgacaaagtcacggaagtatatttgatgctgtttttggacagttgtttttcctttaaatattccaccgtattctgaaggtagaatatcaggctgattcctatcttgatatcttcgcatatccctacatatgcttcccggtccattcttcgctctacaaaaacatctgcatgagaggttattcctgtaccgaaaaagtatggatagtaatattgacggtcaaaccattcatctatatccatgtcgccgcatagggccaggcctattcccgcgccaaactctttctggtattcgcagaagtccatttcgtctcccctggatataaggttatgctgggtaaatgactcttctgtcagccttaggattgcatttaattctcttttgcttttgatatttccaaatccaattgctttcaggtattgatgcatatcatattccttacaaaattattttttaggtatgagtcttgtagttccacccatatatggctgtaaaacttccggaatcttaacggatccatctgcctgaagattattttcaaggaatgctatcagcattctcggaggcgcagctaccgtattattcagcgtatgtgcgaaatatttgctatcctcgccttttacgcggattccaagtcttcttgcctgggcatccccgagattagagcagcttcccacctcaaaatatttcttctgtcttggggaccatgcttctacatcgcaagattttactttcagatctgccagatcaccggagcagcactcaagagtacgtacaggaatatccattgaacggaacagatctaccgtattctgccataatttatcgtaccacatcttgctttcttccggcttgcagacaactatcatttcctgtttttcaaactggtgaattctatatactccacgttcctcgattccatgagcgcctttctccttacggaagcatggagaataactggttagtgtctgtggaagctggtcttctgtaagcatagtatcaatgaattttccaatcatggaatgctcgcttgttccgatcagatataagtcttctccttcaatcttatacatcatggcatccatttcggcaaaactcataacaccggtaactacattgctgcggatcatgaatggcggaatacagtaggtaaatccgcggccaatcataaagtcgcgtgcataagacagcacagcagaatgaagccttgcaatatctcccatcagatagtaaaagccatttcccgcaacccttcctgcactctcaagatcgattccgctaaaactttccatgatttctgtatggtatggaatctcgaaatctggtaccaccggctcgccaaacttctctatttcaacattttcgttgtcgtcttttccaattggtacggaaggatcaatgatattcggaatcgtcatcatgatcttcttaatctttgcttcaacgtccttttcttctgtggaaagagattctaatctgtcagcattctcctgaacctttttctttaattcttctgcctcatctttctttccctgtgccatgcatgcgccgatttccttagaaatcttattcctgtcagcacgaagcgcttctacttcctgcttaatatccctgtttctcttatccaattccagcacttcgtcaactaatggcagtttttcatcctgaaatttctttttaatattttcctttactacatcaggattcattcttacaaatttaatgtctaacatatatatatcctcctcatttcttatatattatctctttatcctattttcctttaatatttttagcgtctatatcataggcatccttgaatatagccttatcaagcgcttctgcctcttcttccgctaattctacataactttctccctttacgatctctttaacataggtgtagcagccctctctgctgtgcatagcgttaatgacccatccgctattattgccatccagcattgccagcgcaaaacttaatttgccacccatttcattaaaagcgtcatatttgacaattcctaatttctgataatcgttctccatctttttgctgatttccctgatatcaagacggttctgcttggtaattttaaggatggcatccacctccgagaacttgtccttcatgctctcttctaaagtctttccatctttcccacgcataaacgaggcataactactttttaatctattatacttcatcgtcacgttcacgtatagcacaaacagcacgacaatcaaaatcagtatgaacaggaaaatgaatgccggatctattgctaatttcttaagtatactactttccatatatttattcttcccttctaatactcattatcatatcgaacacacgttctaattctttatccgaataatattctatctctatcttacctttaccctttcccttcgaagctatacttacttttgtccccataacttctttcatcttctcttccaggtcattgtagataaatacgtgttcgatcaccttcttttctttcggttttttggggttcttaatatcttttataagtttttctgtctcacgaacgcttaacttctcgtcaaatattttatttgccaatatgtattgctgttctttatcatctatagccagcaatgctctggcatgtcctgtagatatcatatcgtctatgatcatctgctgcactttatcatttaatcttaggagacgcatagaatttgttactgctgtccggcttttcgatactctctcagctacctcatcctgttttaagctgaactcttcaagaagtttcttgtatgccatagcctcttcaatcggattcagattttccctttgaatattttctatcaatgctatctctactatttcctgttcagaataatcttttataattactggcacttcttttataccagccaattttgctgctctccatcttctctcaccggcaattatttcataataatccttattcttcctcaccagcaaaggctgtaatactccaaattgcttgatagaatccgctaattccagcagcgcatcttcttcaaaattctttctcggctgatctctgttaggctcaaccatattaatcttcatcatttgctctccagattttaattctggctgcttcacctgttctgtcgatatatccggattagcaggttttacatttctgttgtttggaatcaggctgtcaagtccttttcccagtccttttttatttactgccatcgcatcctcctatagtttacaatcctttacttattacttcatcggcaagtctcatataactctcggaacctgctgactttggatcatattgattaatcggcataccataactcggtgcttcagcaagacgaatatttcttggtatgattgttttataaatattttgttgaagattgtcctttacattctccacaacctgtaatgacaagtttgttctggcatcatacatagtaaatactacgccctctatttccaaatccggattcagtctgtcttttactaattccactgtatggattaattggcttaatccctccaatgcatagtattcacattggataggaactaaaacagaatctgccgttgtcattgcgttgattgtcagcatgctcagcgacggcggacaatcgataataacaaaatcataattatcccgtatcttctgaatagaatttctaacaataaattccttattttcaacgtcaataagttctatttccgctgccgataaatctatatttgtaggaagtacatccagattctccattgtctctttctgcagtacttcctctatatcagattcaccgattatcatatcatataccgttttttctaaaaactctttatccagtcccagaccgctggtcatattcccctgaggatccatgtctacggcaagaacttttttacctttatcggcaagacaagcggatagattaattgcagtcgttgttttacctactccgcccttttgattggcgatagctataattcttcccatttattaatcacctttctttttagcatagatttagtataacactttttatagtacttatctacaaaatgtttcacgtgaaacatagtttttctattattcataaatgtttcacgtgaaacatattatatttggttaattttttcaaggaatgtttcacgtgaaacatttttaatttaatttctcatactactatttcttatatttgtctatttaaatattttttattgtattaccgtatatcaaaatattatttataaagtcatttcatttctaatttcacttatggtagttaatagttttatcattttaattaacccgactcggaatattcaatcatatatacttttcttggtagtagaatgttattaatatataagtcctttagtgtttcacgtgaaacatttacataaaacttaatctgtagtataataatattatcttttcatacagagattattatagaaagaggggtataagtatgagttggaagaaaaaacttgcagccggtacagcattacttggattatccacactaacgatacatatgataaataaatttgtatatttttcagcaacgcttgataacttattaagtaacccatcaggttcatactatgaatggaaatttggaaaaatatattataccaaaaagggcaatggaaaacctctactgttaatacacgatttaaccacctccagttctgcttatgaatggaataaggttatagataagttttcaaaaaccaatactgtttattgtctggatcttttaggttgtggacgatctgataagcctaatcttacttatactaattatttatatgtacaacttttaactgattttattaagcatgtaattggaaataaaacggatattattgcaaccggtgagtctggctcatttgccatagctgcctgccaaaacgacccgacaataatagaccagattgttcttgtgaatccacctaacatcaaattattgtcaaagataccatctaaaagaacgaaggtacttacccgatttattaatctaccaatcttcggaacattcttatacaatatgttgacaagaaagaaaaatattgatgaaacgtttagaatgaattattattataattctgaagatattgatgaaagtataataaatacttattatgaaaccgcccattctggaaatgcactgtccaaatatttgtttgccagtcaatgcggtcactataatacagtaaacatctctcactgtctgaagtctttaacaaacagtattttcataattactggtaatggaaatccagaaaatatgagtgtagcagatatgtataagaatatattaccttccatagaaatcgaaggcgtagaggaaactaagcacctgcctcaattagaaaaatccagcgattttgtagataaggtagatatactccttggaaattgttgataatcggagaaaataatttgaataataaagagtgaagtaacagaatcaattatactgctacctcactctttgttttaatctttactttagtggttcctttgatggtaaacctgcttttcttggaaatttcttgcctgtactctttatcttattaatcttcacaaaagacctgcctatatctgtacctggaagttggaatctatagatatcttccagttcaccgccaagtattcgaaccgcttttccagattcatatatttccttatctatatccccggacttataggaaataaatataccccctacccgtatatacggcagacaatattcgctgagcgtagcaagatttgctactgcccttgaaacgcataaatcatatttttcacggtattctgcctgtcttgcatagtcctccgctcttccatgaattgtatgaatatccttcagtccaagttctttgatgaccgtatcaagaaacttaatcctcttatttagagaatccagcagtgtaattctaaggtggggaaatgcaatcttcaaaggtatgcctggaaatcctgctcctgtacccacatctattacatgatttacattctcaagatccaatacttctaccaaggaaagactatctacaaaatgcttttccaccacttccccatattccgtaatccccgtaagattcatcactttattccattcaaccagaagttggtaaaaatcatcaaactgttttctttgaatttcattgatttgtattcctagtttttctagtttttcttctaataaatgttccattatactctccactatttttcatcaccgccatttgctttaaatacatcaagactttatctcatctcaagataaaccaaaagcactgatatatctgcaggcgatacgccagatattctcgatgcctgtcctatggaagcggggcgatactcttttaatttctgtaaggcttctaaacgcagactctttaccaaattataatcaatgtcttccggaatcttcttattttcaagttttttaaactgttccacctgctttttctgcctgctgatatatccatcatatttgatggaaatattaatctgctctacaacctcttcttccaattcctccggaagtactggcctgcattcatctatatctgccagcatttcataagaaagttccggcctgcggattaattctgcgacggtagatccagatgacagcggagtactttcatacgacttaagcagattctgaactttttcattcgcgccgacactggcatgagtcaggcgctttacttctttttgaattaattcttccttttcaagcaggcgatggtatctcttctctgatataaggcctacttcatagcctattcttgtaagcctctggtcagcattatcctgtctcagaagaaggcggtattctgcgcgcgatgtcatcattctgtacggctcatggctttcttttgttaccagatcatcaatcaacactccaatataggcctgagatcggtccaatattatgctctcttttccctgcagcttcctggctgcatttatgccggcgatcagcccttgagccgccgcttcttcatatccggaacttccattaaactgccctccgctataaaggccgctgatatttttaaattcaagggaaggtctaagctgtctggcatcaatacaatcgtattctatcgcgtatgcgttcctgacaatcttaacattttcaagtcctggtactgtccgatacatttcatattgaacatcttccggcagcgagctggacattcccccgatatacatttcattcgtttccaggccttccggctcgataaatacctgatgcctgtccttgtctgcaaactttaccaccttgtcttctatagaaggacagtatctgggtccggttccctcaatcataccagaaaatagaggggaacgatccagattcttcctgatgatctcatgagttcttggattcgtatatgtcagccagcaggatgactgatctatctgtacatcttttggatcagtggtaaatgaaaaaggaatcaccttttcatctccaaactgttcctccattttgctgaaatctacagaatttttatctattctggcaggcgtccctgttttgaaccgatacattttgattcctaaatcctccaggcagtctgtcagataattagccgcctgcagcccatttggccctgtataattgcttacgtctccatagatgcagcgggaacgaagataagtacctgtacaaagaatgaccgccctgcatggatatattgtcccggaaaaggtctgaactccggtaaccttgccctcgtctactaatattttgacaacctcatcctgttttatatcaagattatcctgattctccagaacctgtctcattgttctgctgtaccacgccttatctgcctgggctctgagagaatgaaccgcaggtccctttgacttattgagcatcttcgactggataaaggtctgatcaattaccttgcccatctctcctccaagcgcatctatctcgcgaaccaaatgtcccttagaactgccgcctatattaggattacaaggcattaatgctatactgtctacactgacggtaaataccattgtctgatatcctagccttgccgtcgcgagggcagcctcgcatcccgcatgtccggctccaattactactacatcatatccatctctatttacccatacagaatttgctgaatatttcatttaccaaatcttctcctatcgtttcacctgtaatgcttccgagagattcataggcatccatcaagtcaatgctgtagaaatcctcaggcatcccggcatcaatactttccgttactctttccagcgcattataagcatcctgaagcgcggtcttatgacgaatatttgttatatatatctcatcattaaatgaaagatttccttcaaaaaacatatcctttagtttttcttccaattcatcaattccctgtttatttttggcagaaatctcaataataggtattggttcgccacttttttttgcaggattacttgcaaaatatgcctcctgaaccttttcttttgttactatcatatctaaatccgatttatttagcaatatgatagaaggttttccttttattagacttaatatttcataatcattttcatctaattctgttgatgcatcaatcacgtaaataatcaagtctgccttatctgcatgactttttgctttttctacgccaatcttctccaccacatcttttgtatccctgattcctgcagtatccataatatttaaagatatcccttgaagattaatatgttcctccagcacatcccttgtggttcctgcaatttccgtcactatcgccttatcctgccccagcagtacattaagcaaggaagactttccggcattcggctttcctaatattaccgtctgaattccttcttttataagacgtccatcatcacatgtacgcaatagtttctcaatatcatttcttaatttccggacaacagattccaattcttccccatactcatcaacactgatatgttcaggatcatccaatgctgtctcaataaatgctgtatggtaaattatttcttttcttatgttatttattttattcttaatactgccttttaactggtttattgaactttgcaacgcatactcgttctgggatacgattagatcgccgactgcttctgcctgggataagtccaggcgcccattcaggaatgcgcgcttggtaaactctccgggttgtgccggccttgctccattttcaatcaggagttccagaatcttcttcacaatatatacgccgccatgacagttaatctctattgtatcttcccccgtatagctatgaggacttctcataatcattacaaggacttcatcaatctctttccctctatctgtaatatatccataatgaatcgtatgggattgctgctgggagagcttcttattcttctttcccttatataccctgtccgctatatcgaatgcatcacatccgctcattcttacaatccctattcctgcattactcatggctgtagaaatagcagcaattgtagtatcataatgattattcatgatctcctcctgttctaatatagaaaaaaataggggtcatatcctaacccctactttcttacttttatttacgtacaagagttacgacaactcttctataaggctcttctccctcactatgtgtggatactgccggatccccctgaagcgcggaatgtataattcttctttcatatggattcatcggctctaaagaaacggttcttctcgttctctttaccttgcttgcaatattcttcgcaagattttccaaggtttccttccttcttctacgataatcttccgtatcaagctttacacggacatatccttcctgcatcttattggcgactctgttcgtaagatactgaagcgaatcaagagtctgtccacgtttgccaataagaattcccatgttgcttccttccatatcaatcgaaagagcaccttcttcatcaacgacggatgtcaccttcacgtccgtcatatccattgccttcaatacatcatagataaacttttcgcaagcctcgattgtctggctctcgacctttgccagatctgcctccttctttgccggctctttctttactgtctctttttttatggtttccttcttcgcaatttctttctttacagtcttgggctcttcctttttcataacagcaggctctgactttacatcttccacaatctctgcttccggctcttcgacgacttttctgcgtgctttgatgactgcctgcttcattcctataccaaggaagcctgcactgcctttttcaataacttcatattccagctgatcgcttgttacgcctaattgaattaatgcttcggtaattgcatcatccaacgtttttgctgacacagtaatgtattccatgatagccgccccctaatcattttcattaaatttcttaaccatgtttgcttttgatgcaaggcttccggcttttgcattcttggcattttcctttgcctttgctaccttttcttctttttccttctcgcttatgcttgatacgttacgcttagcggtttcccttatgctctttgtatttgtctgagccatagcattgattctctctgccttctcgccccgcttctcacgtttcttagcagctttttccctgttcttttcaatcaagtcatccacggacatcttagaaagatgcttgttaatcatcaactgctgtacacaacgtactaccgcacttataatccagtaaagaccaatacctgtcggcagtgtgaataccatgaagatggagaacaaaggtattgtcatgttcattgtcttcattgttccagccatcggattatccttgtccagctgctggcctgagatagactgtgaaagcctgatactcagatattgcgtaagacccgatataattggaagcaggattgccgttacaatgattaccgcagccggaagaccataatctccgctgttcttaatcataactgtaggcgaaactgtcagattcggaatggtaataaatctatttacagcgtccggagcattcttgattgccggtacataagtctgaatatcatagataaccgggtacaaggcaaacaggaacggcatctgtattaataaaggaagacatccgcctgtcattgatgttccatatttgtcatatacctgctgcatctcttcctgctgcttcagcatggaagcctgatctcttttattcttatatttcttctgaatcgcctgaagttcaggattcataacagaagacatctttgctgtcctctgctgcttaattgtcagcggcatcatgcatgtatatactaatattgtatagataatgattgataatccgacaagcccgctgtcacttggcagaatactatctaatatggtatagataaagttcataactttacctaataaccagcaaatctgaccgacaataggccagtttgcagcagtcagtaaactaaacgtcattctctcttcctccattgtagttgtaaatcattaaggaacggggtcatatccacccttagcaaagggattacaacgcaatattctccaaaccgccataagtcctcccttgaaagcgccatacttttcaattgcttctacagcatactgagagcaggttggaaaatagatacatgtagaataacttttcaggccagataaatatttctgataaaacctgattaagcctaacataatctttttcataatacgttaccccaaatctataatttcatgaagacgtcccagatgaagcaatgcgctctcaatgtctttataggttctaccctttgcgcctattcttgctattacaacgatatctattccacatctgaatctgtcttcttgcaatctatagctttctctaattaatctagtcaatctgtgtcgtactatactatttcctacttttttacttacagatattcccaatcggttctttccggtattattttccttaatatacattaccagatacttattcgcataagattttccacacttataaacaagttggaaatccttattttttttcagtgattcggaatatttcattgcctgattctcctaatttttagagaagaaaaggccacatatatgcggcctacgctgataatctctttcttccctttgctcttctgctagcaagtacttttcttccacctgccgtgctcattcttgatctgaatccatgaactttagctctttgtctcttttttggttggaatgtcattttcatagatatccacctccttatattttataagggaatacccctacttttttttctaagacatcagttttgattatattaaaaaaatggctctacgtcaagcaaaacctggatttttataaattattttatccacaaattgtggataacctgttaattttaggtggataatgtgtggatattaaaatatttttaattttatttgtttaaaacaagcctttttaaactgtgaataaagttatccacatggattaaagattgcttaaattcttattttgatgtagaatatatgagagtgggtctttatttaaaaagccacgaattggatagattaggagtttgctgaa
